(19) United States
(12) Patent Application Publication
(10) Pub. No.: US 2005/0150008 A1
(43) Pub. Date: Jul. 7, 2005

(54) Compositions isolated from forage grasses and methods of use

(75) Inventors: Jeroen Demmer, Torbay (NZ); Richard L. Forster, Pukekohe (NZ); Michael Andrew Shenk, Hokowhitu (NZ); Michael Geoffrey Norriss, Riccarton (NZ); Matthew Glenn, Palmerston North (NZ); Keith Martin Saulsbury, Christchurch (NZ); Claire Hall, Mission Bay (NZ)

Correspondence Address: SPECKMAN LAW GROUP PLLC, 1501 WESTERN AVE, SEATTLE, WA, 98101, US

(73) Assignees: AGRIGENESIS BIOSCIENCES LIMITED, Auckland (NZ); WRIGHTSON SEEDS LIMITED, Porirua (NZ)

(21) Appl. No.: 10/955,745

(22) Filed: Sep. 30, 2004

Related U.S. Application Data
(63) Continuation-in-part of application No. 10/289,757, filed on Nov. 7, 2002.
(60) Provisional application No. 60/507,991, filed on Oct. 2, 2003.
(60) Provisional application No. 60/563,879, filed on Apr. 20, 2004.
(60) Provisional application No. 60/337,703, filed on Nov. 7, 2001.

(51) Int. Cl. A01H 5/00; A01H 1/00; C12N 15/82; C07H 21/04; C12N 9/24; C12N 5/04

(52) U.S. Cl. 800/284; 800/320; 435/200; 435/468; 435/419; 536/23.2

(57) ABSTRACT

Isolated polynucleotides encoding polypeptides active in lignin, fructan and tannin biosynthetic pathways are provided, together with expression vectors and host cells comprising such isolated polynucleotides. Methods for the use of such polynucleotides and polypeptides are also provided.

### REFERENCE TO RELATED APPLICATIONS

[0001] This application claims priority to U.S. Provisional Patent Application No. 60/507,991 filed on Oct. 2, 2003 and U.S. Provisional Patent Application No. 60/563,879, filed on Apr. 20, 2004, and is a continuation-in-part of U.S. patent application Ser. No. 10/289,757, filed Nov. 7, 2002, which claims priority to U.S. Provisional Patent Application No. 60/337,703, filed Nov. 7, 2001.

### REFERENCE TO SEQUENCE LISTING SUBMITTED ON COMPACT DISC

[0002] This application incorporates by reference in its entirety the Sequence Listing contained in the accompanying two compact discs, one of which is a duplicate copy. Each CD contains the following file: 11001.1061C1 SEQLIST.TXT, having a date of creation of Sep. 29, 2004 and constituting 600 KB.

### TECHNICAL FIELD OF THE INVENTION

[0003] This invention relates to polynucleotides isolated from forage grass tissues, specifically from Lolium perenne (perennial ryegrass) and Festuca arundinacea (tall fescue), as well as oligonucleotide probes and primers, genetic constructs comprising the polynucleotides, biological materials (including host cells and plants) incorporating the polynucleotides, polypeptides encoded by the polynucleotides, and methods for using the polynucleotides and polypeptides. More particularly, the invention relates to polypeptides involved in the lignin, tannin and fructan biosynthetic pathways, and to polynucleotides encoding such polypeptides.

### BACKGROUND OF THE INVENTION

[0004] Over the past 50 years, there have been substantial improvements in the genetic production potential of ruminant animals (sheep, cattle and deer). Levels of meat, milk or fiber production that equal an animal's genetic potential may be attained within controlled feeding systems, where animals are fully fed with energy dense, conserved forages and grains. However, the majority of temperate farming systems worldwide rely on the in situ grazing of pastures. Nutritional constraints associated with temperate pastures can prevent the full expression of an animal's genetic potential. This is illustrated by a comparison between milk production by North American grain-fed dairy cows and New Zealand pasture-fed cattle. North American dairy cattle produce, on average, twice the milk volume of New Zealand cattle, yet the genetic base is similar within both systems (New Zealand Dairy Board and United States Department of Agriculture figures). Significant potential therefore exists to improve the efficiency of conversion of pasture nutrients to animal products through the correction of nutritional constraints associated with pastures.

Lignin Biosynthetic Pathway

[0005] Lignin is an insoluble polymer that serves as a matrix around the polysaccharide components of some plant cell walls, and that is primarily responsible for the rigidity of plant stems. Generally, the higher the lignin content, the more rigid the plant. For example, tree species synthesize large quantities of lignin, with lignin constituting 20%-30% of the dry weight of wood. The lignin content of grasses ranges from 2-8% of dry weight and changes during the growing season. In addition to providing rigidity, lignin aids in water transport within plants by rendering cell walls hydrophobic and water impermeable. Lignin also plays a role in disease resistance of plants by impeding the penetration and propagation of pathogenic agents.

[0006] Forage digestibility is affected by both lignin composition and concentration. Lignin is largely responsible for the digestibility, or lack thereof, of forage crops, with small increases in plant lignin content resulting in relatively high decreases (>10%) in digestibility (Buxton and Russell, Crop. Sci. 28:5358-558, 1988). For example, crops with reduced lignin content provide more efficient forage for cattle, with the yield of milk and meat being higher relative to the amount of forage crop consumed. During normal plant growth, an increase in the maturity of the plant stem is accompanied by a corresponding increase in lignin content and composition that causes a decrease in digestibility. This change in lignin composition is to one of increasing syringyl:guaiacyl (S:G) ratio. When deciding on the optimum time to harvest forage crops, farmers must therefore choose between a high yield of less digestible material and a lower yield of more digestible material.

[0007] Lignin is formed by polymerization of three different monolignols, para-coumaryl alcohol, coniferyl alcohol and sinapyl alcohol that are synthesized in a multistep pathway, with each step in the pathway being catalyzed by a different enzyme. The three monolignols are derived from phenylalanine or tyrosine in a multistep process and are then polymerized into lignin by a free radical mechanism. Following polymerization, para-coumaryl alcohol, coniferyl alcohol and sinapyl alcohol are converted into the p-hydroxyphenyl (H), guaiacyl (G) and syringyl (S) units of lignin, respectively. While these three types of lignin subunits are well known, it is likely that slightly different variants of these subunits may be involved in the lignin biosynthetic pathway in various plants. For example, studies suggest that both free monolignols and monolignol-4-coumarate esters may be substrates for lignin formation in grasses. The relative concentration of the monolignol residues in lignin varies among different plant species and within species. For example, the monolignol content for H/G/S of grasses, alfalfa and softwood gymnosperms is 22%/44%/34%, 7%/39%/54% and 14%/80%/6%, respectively (van Soest in “Nutritional Ecology of the Ruminant,” Cornell University Press, Ithaca, N.Y.). The composition of lignin may also vary among different tissues within a specific plant.

[0008] Coniferyl alcohol, para-coumaryl alcohol and sinapyl alcohol are synthesized by similar pathways (Whetten et al., Ann. Rev. Plant Physiol. Plant Mol. Biol. 49:585-609, 1998; Guo et al., Plant Cell 13:73-88, 2001). The first step in the lignin biosynthetic pathway is the deamination of phenylalanine or tyrosine by phenylalanine ammonia-lyase (PAL) or tyrosine ammonia-lyase (TAL), respectively. In maize, the PAL enzyme also has TAL activity (Rosler et al., Plant Physiol. 113:175-179, 1997). The product of TAL activity on tyrosine is 4-coumarate, whereas the product of PAL activity on phenylalanine is cinnamate which is then hydroxylated by cinnamate 4-hydroxylase (C4H) to form 4-coumarate. 4-Coumarate is hydroxylated by coumarate 3-hydroxylase (C3H) to give caffeate. The newly added hydroxyl group is then methylated by caffeic acid O-methyl transferase (COMT) to give ferulate. Several other methylation reactions can be catalyzed by COMT, including caffeoylaldehyde to coniferaldehyde, and 5-hydroxyconiferaldehyde to sinapaldehyde. 4-Coumarate, caffeate and ferulate can all be conjugated to coenzyme A by 4-coumarate: CoA ligase (4CL) to form 4-coumaryl CoA, caffeoyl CoA and feruloyl CoA, respectively. Caffeoyl CoA can then be methylated by the enzyme caffeoyl-CoA O-methyl transferase (CAMT).

[0009] Coniferaldehyde is hydroxylated to 5-hydroxyconiferaldehyde by ferulate 5-hydroxylase (F5H). Reduction of 4-coumaryl CoA, caffeoyl CoA and feruloyl-CoA to 4-coumaraldehyde, caffeoyl aldehyde and coniferaldehyde, respectively, is catalyzed by cinnamoyl-CoA reductase (CCR). Coumaraldehyde, caffeoyl aldehyde, coniferaldehyde and 5-hydroxyconfieraldehyde are further reduced by the action of cinnamyl alcohol dehydrogenase (CAD) to give coniferyl alcohol which is then converted into its glucosylated form for export from the cytoplasm to the cell wall by coniferol glucosyl transferase (CGT). Recently a sinapyl alcohol dehydrogenase (SAD) was described that converts sinapaldehyde to sinapyl alcohol (Li et al., Plant Cell 13:1567-1586, 2001). Following export, the de-glucosylated form of coniferyl alcohol is obtained by the action of coniferin beta-glucosidase (CBG). Finally, polymerization of the three monolignols to provide lignin is catalyzed by phenolase (PNL), laccase (LAC) and peroxidase (PER). For a more detailed review of the lignin biosynthetic pathway, see Whetton R and Sederoff R, The Plant Cell, 7:1001-1013, 1995 and Whetten et al., Annu. Rev. Plant Physiol. Plant Mol. Biol. 49:585-609, 1998.

[0010] Both lignin levels and composition have been changed in a range of plant species by altering the expression of specific lignin biosynthetic enzymes. For example, anti-sense 4CL constructs in transgenic aspen trees reduced lignin content from 20 to 11% (a 45% reduction) but at the same time increased both cellulose levels (by 15%) and growth rate (Hu et al. Nature Biotechnol. 17:808-812, 1999). These trees had the same level of total carbon, suggesting that carbon partitioning had been altered. Reducing 4CL by either anti-sense or sense-suppression in tobacco plants led to an accumulation of hydroxycinnamic acids in cell walls as well as a reduction in both guaiacyl and syringyl lignin units (Kajita et al., Plant Cell. Physiol. 37:957-965, 1996). In transgenic tobacco plants in which levels of C4H were reduced by anti-sense or sense suppression, total lignin content was reduced, in addition to a reduction in syringyl lignin units (Sewalt et al., Plant Physiol. 115:41-50, 1997). Reducing the levels of PAL in tobacco plants by anti-sense or sense-suppression reduced total lignin content but did not change the syringyl-guaiacyl (S:G) lignin ration. In alfalfa, reducing expression of COMT through either anti-sense or gene silencing decreased total lignin by decreasing the amount of guaiacyl units and resulted in a near total loss of syringyl lignin units (Guo et al., Plant Cell 13:73-88, 2001). In contrast, reducing CCOMT expression through anti-sense or gene silencing in alfalfa plants also decreased total lignin by reducing the total amount of guaiacyl lignin units but had no effect on the amount of syringyl lignin. Reducing CCR expression by anti-sense in tobacco plants resulted in reduced lignin content and increased S:G ratios due to lower guaiacyl lignin units (Piquemal et al., Plant J. 13:71-83, 1998). A. thaliana plants where the F5H gene had been mutated contained only traces of syringyl lignin (Marita et al., Proc. Natl. Acad. Sci. USA 96:12323-12332, 1999).

[0011] Alteration of grass lignin composition may usefully be employed to maintain high forage digestibility throughout the year. This is most important when the plant is approaching flowering and/or during flowering. At this time, the entire lignin biosynthetic pathway will preferably be reduced, in particular lowering the amount of syringyl lignin units, thereby lowering the S:G ratio and maintaining the digestibility of the forage crop.

[0012] Several of the enzymes involved in the lignin biosynthetic pathway also have other functions within the plant. For example, PAL is a key enzyme of plant and fungi phenylpropanoid metabolism and catalyzes the first step in phenylpropanoid metabolism. It is involved in the biosynthesis of a wide variety of secondary metabolites such as flavonoids, furanocoumar in phytoalexins and cell wall components. These compounds have many important roles in plants during normal growth and in responses to environmental stress. PAL catalyzes the removal of an ammonia group from phenylalanine to form trans-cinnamate. PAL and the related histidine ammonia lyase are unique enzymes which are known to have the modified amino acid dehydroalanine (DHA) in their active site (Taylor et al., J. Biol. Chem. 265:18192-18199, 1990).

[0013] C4H, which is a member of the cytochrome P450 monooxygenase superfamily, plays a central role in both phenylpropanoid metabolism and lignin biosynthesis where it anchors a phenylpropanoid enzyme complex to the endoplasmic reticulum (ER). The phenylpropanoid pathway controls the synthesis of lignin, flower pigments, signaling molecules, and a large spectrum of compounds involved in plant defense against pathogens and UV light. This is also a branch point between general phenylpropanoid metabolism and pathways leading to various specific end products. 4CLs are a group of enzymes necessary for maintaining a continuous metabolic flux for the biosynthesis of plant phenylpropanoids, such as lignin and flavonoids that are essential to the survival of plants, because they serve important functions in plant growth and adaptation to environmental perturbations. Three isoforms of 4CL have been identified with distinct substrate preference and specificities. Expression studies in angiosperms revealed a differential behavior of the three genes in various plant organs and upon external stimuli such as wounding and UV irradiation or upon challenge with fungi. One isoform is likely to participate in the biosynthetic pathway leading to flavonoids whereas the other two are probably involved in lignin formation and in the production of additional phenolic compounds other than flavonoids (Ehlting et al., Plant J. 19:9-20, 1999).

[0014] F5H is involved in the phenylpropanoid biosynthesis pathway. It belongs to the CYP84 subfamily of the cytochrome P450 family and is known as cytochrome P450 84A1. F5H is one of the enzymes in the pathways leading to the synthesis of sinapic acid esters, but also has coniferaldehyde hydroxylase activity (Nair et al., Plant Physiol. 123:1623-1634, 2000). In the generalized pathway for phenylpropanoid metabolism, F5H catalyzes the formation of 5-hydoxyferulate (a precursor of sinapate) and sinapate in turn as the precursor for sinapine and for sinapoyl CoA in two bifurcated pathways (Chapple et al., Plant Cell 4:1413-1424, 1992). Sinapoyl CoA has been considered as the precursor for sinapyl alcohol, which is then polymerized into syringyl (S) lignin. In addition, CYP84 F5H product carries out the hydroxylation of coniferaldehyde (ConAld) to 5-OH ConAld (Nair et al., Plant Physiol. 123:1623-1634, 2000).

[0015] Peroxidases are heme-containing enzymes that use hydrogen peroxide as the electron acceptor to catalyze a number of oxidative reactions. They belong to a superfamily consisting of 3 major classes. Class III consists of the secretory plant peroxidases, which have multiple tissue-specific functions in removal of hydrogen peroxide from chloroplasts and cytosol, oxidation of toxic compounds, biosynthesis of the cell wall, defence responses towards wounding, indole-3-acetic acid (IAA) catabolism and ethylene biosynthesis.

Fructan Biosynthetic Pathway

[0016] Plant carbohydrates can be divided into two groups depending on their function within the plant. Structural carbohydrates, such as cellulose, are usually part of the extracellular matrix. Non-structural, storage carbohydrates act as either long- or short-term carbohydrate stores. Examples of non-structural carbohydrates include starch, sucrose and fructans.

[0017] Fructans are polymers that are stored in the vacuole and that consist of linear and branched chains of fructose units (for review, see Vijn and Smeekens Plant Physiol. 120:351-359, 1999). They play an important role in assimilate partitioning and possibly in stress tolerance in many plant families. Grasses use fructans instead of starch as a water-soluble carbohydrate store (Pollock et al., in “Regulation of primary metabolic pathways in plants”, N. J. Kruger et al., (eds), Kluwer Academic Publishers, The Netherlands, pp195-226, 1999). Increasing the amount of fructans and sucrose in forage crops leads to an increase in the level of water-soluble carbohydrates and thereby enhances the nutritional value of the plants. In addition, increasing the amount of fructans in forage plants decreases methane production in animals fed the plants, thereby leading to lower greenhouse gas emissions, and decreases urea production in animals as less protein is degraded in the rumen (Biggs and Hancock, Trends in Plant Sci. 6:8-9, 2001). Fructans have also been implicated in protecting plants against water deficits caused by drought or low temperatures. Introduction of enzymes involved in the fructan biosynthetic pathway into plants that do not naturally synthesize fructans may be employed to confer cold tolerance and drought tolerance (Pilon-Smits, Plant Physiol. 107:125-130, 1995).

[0018] The number of fructose units within a fructan chain is referred to as the degree of polymerization (DP). In grasses, fructans of DP 6-10 are common. Such fructans of low DP are naturally sweet and are therefore of interest for use as sweeteners in foodstuffs. Long fructan chains form emulsions with a fat-like texture and a neutral taste. The human digestive system is unable to degrade fructans, and fructans of high DP may therefore be used as low-calorie food ingredients. Over-expression of enzymes involved in the fructan biosynthetic pathway may be usefully employed to produce quantities of fructans that can be purified for human consumption.

[0019] Five major classes of structurally different fructans have been identified in plants, with each class showing a different linkage of the fructosyl residues. Fructans found in grasses are of the mixed levan class, consisting of both (2-1)- and (2-6)-linked beta-D-fructosyl units (Pollock et al., in “Regulation of primary metabolic pathways in plants”, N. J. Kruger et al., (eds), Kluwer Academic Publishers, The Netherlands, pp195-226, 1999). Fructans are synthesized by the action of fructosyltransferase enzymes on sucrose in the vacuole. These enzymes are closely related to invertases, enzymes that normally hydrolyze sucrose.

[0020] Grasses use two fructosyltransferase enzymes to synthesize fructans, namely sucrose:sucrose 1-fructosyltransferase (1-SST) and sucrose:fructan 6-fructosyltransferase (6-SFT) (Pollock et al., in “Regulation of primary metabolic pathways in plants”, N. J. Kruger et al., (eds), Kluwer Academic Publishers, The Netherlands, pp195-226, 1999). 1-SST is a key enzyme in plant fructan biosynthesis, while 6-SFT catalyzes the formation and extension of beta-2,6-linked fructans that is typically found in grasses. Specifically, 1-SST catalyzes the formation of 1-kestose plus glucose from sucrose, while 6-SFT catalyzes the formation of bifurcose plus glucose from sucrose plus 1-kestose and also the formation of 6-kestose plus glucose from sucrose. Both enzymes can modify 1-kestose, 6-kestose and bifurcose further by adding additional fructose molecules. Over-expression of both 1-SST and 6-SFT in the same plant may be employed to produce fructans for use in human foodstuffs (Sevenier et al., Nature Biotechnol. 16:843-846; Hellwege et al., Proc. Nat. Acad. Sci. USA 97:8699-8704, 2000).

[0021] The synthesis of sucrose from photosynthetic assimilates in plants, and therefore the availability of sucrose for use in fructan formation, is controlled, in part, by the enzymes sucrose phosphate synthase (SPS) and sucrose phosphate phosphatase (SPP). Sucrose plays an important role in plant growth and development, and is a major end product of photosynthesis. It also functions as a primary transport sugar and in some cases as a direct or indirect regulator of gene expression (for a review see Smeekens, Curr. Opin. Plant Biol. 1:230-234, 1998). SPS regulates the synthesis of sucrose by regulating carbon partitioning in the leaves of plants and therefore plays a major role as a limiting factor in the export of photoassimilates out of the leaf. The activity of SPS is regulated by phosphorylation and moderated by concentration of metabolites and light (Huber et al., Plant Physiol. 95:291-297, 1991). Specifically, SPS catalyzes the transfer of glucose from UDP-glucose to fructose-6-phosphate, thereby forming sucrose-6-phosphate (Suc-6-P). Suc-6-P is then dephosphorylated by SPP to form sucrose (Lunn et al., Proc. Natl. Acad. Sci. USA 97:12914-12919, 2000). The enzymes SPS and SPP exist as a heterotetramer in the cytoplasm of mesophyll cells in leaves, with SPP functioning to regulate SPS activity. SPS is also important in ripening fruits, sprouting tubers and germinating seeds (Laporte et al., Planta 212:817-822, 2001).

[0022] Once in the vacuole, sucrose can be converted into fructan by fructosyltransferases as discussed above, or hydrolyzed into glucose and fructose by the hydrolase enzymes known as invertases (Sturm, Plant Physiol. 121:1-7, 1999). There are several different types of invertases, namely extracellular (cell wall), vacuolar (soluble acid) and cytoplasmic, with at least two isoforms of each type of invertase normally being found within a plant species. In addition to having different subcellular locations, the different types of invertases have different biochemical properties. For example, soluble and cell wall invertases operate at acidic pH, whereas cytoplasmic invertases work at a more neutral or alkaline pH. Invertases are believed to regulate the entry of sucrose into different utilization pathways (Grof and Campbell, Aust. J. Plant Physiol. 28:1-12, 2001). Reduced vacuolar or cytoplasmic invertase activity in sink tissues may increase the level of water-soluble carbohydrates in plants. Plants contain several isoforms of cell wall invertases (CWINV), which accumulate as insoluble proteins. CWINV plays an important role in phloem unloading and in stress response. It hydrolyzes terminal non-reducing beta-D-fructofuranoside residues in beta-D-fructo-furanosides.

[0023] Another enzyme that acts upon sucrose in plants is soluble sucrose synthase (SUS). Recent results indicate that SUS is localized in the cytosol, associated with the plasma membrane and the actin cytoskeleton. Phosphorylation of SUS is one of the factors controlling localization of the enzyme (Winter and Huber, Crit. Rev. Biochem. Mol. Biol. 35:253-89, 2000). It catalyzes the transfer of glucose from sucrose to UDP, yielding UDP-glucose and fructose. Increasing the amount of SUS in a plant increases the amount of cellulose synthesis, whereas decreasing SUS activity should increase fructan levels. Increased SUS concentration may also increase the yield of fruiting bodies. SUS activity is highest in carbon sink tissues in plants and low in photosynthetic source tissues, and studies have indicated that SUS is the main sucrose-cleaving activity in sink tissues. Grasses have two isoforms of SUS that are encoded by separate genes. These genes are differentially expressed in different tissues.

Tannin Biosynthetic Pathway

[0024] Condensed tannins are polymerized flavonoids. More specifically, tannins are composed of catechin 4-ol and catechin monomer units, and are stored in the vacuole. In many temperate forage crops, such as ryegrass and fescue, foliar tissues are tannin-negative. This leads to a high initial rate of fermentation when these crops are consumed by ruminant livestock, resulting in both protein degradation and production of ammonia by the livestock. These effects can be reduced by the presence of low to moderate levels of tannin. In certain other plant species, the presence of high levels of tannins reduces palatability and nutritive value. Introduction of genes encoding enzymes involved in the biosynthesis of condensed tannins into a plant may be employed to synthesize flavonoid compounds that are not normally made in the plant. These compounds may then be isolated and used for treating human or animal disorders or as food additives.

[0025] Much of the biosynthetic pathway for condensed tannins is shared with that for anthocyanins, which are pigments responsible for flower color. Therefore, modulation of the levels of enzymes involved in the tannin biosynthetic pathway may be employed to alter the color of foliage and the pigments produced in flowers.

[0026] Most tannins described to date contain pro-cyanidin units derived from dihydroquercetin and pro-delphinidin units derived from dihydromyricetin. However, some tannins contain pro-pelargonidin units derived from dihydrokaempferol. The initial step in the tannin biosynthetic pathway is the condensation of coumaryl CoA with malonyl CoA to give naringenin-chalcone, which is catalyzed by the enzyme chalcone synthase (CHS). The enzyme chalcone isomerase (CHI) catalyzes the isomerization of naringenin chalcone to naringenin (also known as flavanone), which is then hydroxylated by the action of the enzyme flavonone 3-beta-hydroxylase (F3βH) to give dihydrokaempferol. The enzyme flavonoid 3′-hydroxylase (F3′OH) catalyzes the conversion of dihydrokaempferol to dihydroquercetin, which in turn can be converted into dihydromyricetin by the action of flavonoid 3′5′-hydroxylase (F3′5′OH). The enzyme dihydroflavonol-4-reductase (DFR) catalyzes the last step before dihydrokaempferol, dihydroquercetin and dihydromyricetin are committed for either anthocyanin (flower pigment) or proanthocyanidin (condensed tannin) formation. DFR also converts dihydrokaempferol to afzelchin-4-ol, dihydroquercetin to catechin-4-ol, and dihydromyricetin to gallocatechin-4-ol, probably by the action of more than one isoform. For a review of the tannin biosynthetic pathway, see, Robbins M. P. and Morris P. in Metabolic Engineering of Plant Secondary Metabolism, Verpoorte and Alfermann (eds), Kluwer Academic Publishers, the Netherlands, 2000.

[0027] While polynucleotides encoding some of the enzymes involved in the lignin, fructan and tannin biosynthetic pathways have been isolated for certain species of plants, genes encoding many of the enzymes in a wide range of plant species have not yet been identified. Thus there remains a need in the art for materials useful in the modification of lignin, fructan and tannin content and composition in plants, and for methods for their use.

### SUMMARY OF THE INVENTION

[0028] The present invention provides enzymes involved in the lignin, fructan or tannin biosynthetic pathways that are encoded by polynucleotides isolated from forage grass tissues. The polynucleotides were isolated from Lolium perenne (perennial ryegrass) and Festuca arundinacea (tall fescue) tissues taken at different times of the year, specifically in winter and spring, and from different parts of the plants, including: leaf blades, leaf base, pseudostems, floral stems, roots, inflorescences and stems. The present invention also provides genetic constructs, expression vectors and host cells comprising the inventive polynucleotides, and methods for using the inventive polynucleotides and genetic constructs to modulate the biosynthesis of lignins, fructans and tannins.

[0029] In specific embodiments, the isolated polynucleotides of the present invention comprise a sequence selected from the group consisting of: (a) SEQ ID NO: 1-62 and 125-162; (b) complements of SEQ ID NO: 1-62 and 125-162; (c) reverse complements of SEQ ID NO: 1-62 and 125-162; (d) reverse sequences of SEQ ID NO: 1-62 and 125-162; (e) sequences having a 99% probability of being functionally or evolutionarily related to a sequence of (a)-(d), determined as described below; and (f) sequences having at least 75%, 80%, 90% or 98% identity to a sequence of (a)-(d), the percentage identity being determined as described below. Polynucleotides comprising at least a specified number of contiguous residues (“x-mers”) of any of SEQ ID NO: 1-62 and 125-162; and oligonucleotide probes and primers corresponding to SEQ ID NO: 1-62 and 125-162 are also provided. All of the above polynucleotides are referred to herein as “polynucleotides of the present invention.”

[0030] In further aspects, the present invention provides isolated polypeptides comprising an amino acid sequence of SEQ ID NO: 63-124 and 163-190, together with polypeptides comprising a sequence having at least 75%, 80%, 90% or 98% identity to a sequence of SEQ ID NO: 63-124 and 163-190, wherein the polypeptide possesses the same functional activity as the polypeptide comprising a sequence of SEQ ID NO: 63-124 and 163-190. The present invention also contemplates isolated polypeptides comprising at least a functional portion of a polypeptide comprising an amino acid sequence selected from the group consisting of: (a) SEQ ID NO: 63-124 and 163-190; and (b) sequences having at least 75%, 80%, 90% or 98% identity to a sequence of SEQ ID NO: 63-124 and 163-190.

[0031] In another aspect, the present invention provides genetic constructs comprising a polynucleotide of the present invention, either alone, in combination with one or more of the inventive sequences, or in combination with one or more known polynucleotides.

[0032] In certain embodiments, the present invention provides genetic constructs comprising, in the 5′-3′ direction: a gene promoter sequence; an open reading frame coding for at least a functional portion of a polypeptide of the present invention; and a gene termination sequence. An open reading frame may be orientated in either a sense or anti-sense direction. Genetic constructs comprising a non-coding region of a polynucleotide of the present invention or a polynucleotide sequence complementary to a non-coding region, together with a gene promoter sequence and a gene termination sequence, are also provided. Preferably, the gene promoter and termination sequences are functional in a host cell, such as a plant cell. Most preferably, the gene promoter and termination sequences are those of the original enzyme genes but others generally used in the art, such as the Cauliflower Mosaic Virus (CMV) promoter, with or without enhancers, such as the Kozak sequence or Omega enhancer, and Agrobacterium tumefaciens nopalin synthase terminator may be usefully employed in the present invention. Tissue-specific promoters may be employed in order to target expression to one or more desired tissues. The construct may further include a marker for the identification of transformed cells.

[0033] In a further aspect, transgenic cells, such as transgenic plant cells, comprising the constructs of the present invention are provided, together with tissues and plants comprising such transgenic cells, and fruits, seeds and other products, derivatives, or progeny of such plants.

[0034] In yet another aspect, methods for modulating the lignin, fructan or tannin content and composition of a target organism, such as a plant, are provided, such methods including stably incorporating into the genome of the target plant a genetic construct comprising a polynucleotide of the present invention. In a preferred embodiment, the target plant is a forage grass, preferably selected from the group consisting of Lolium and Festuca species, and most preferably from the group consisting of Lolium perenne and Festuca arundinacea. In a related aspect, a method for producing a plant having altered lignin, fructan or tannin composition is provided, the method comprising transforming a plant cell with a genetic construct comprising of the present invention to provide a transgenic cell, and cultivating the transgenic cell under conditions conducive to regeneration and mature plant growth.

[0035] In yet a further aspect, the present invention provides methods for modifying the activity of an enzyme in a target organism, such as a plant, comprising stably incorporating into the genome of the target organism a genetic construct of the present invention. In a preferred embodiment, the target plant is a forage grass, preferably selected from the group consisting of Lolium and Festuca species, and most preferably from the group consisting of Lolium perenne and Festuca arundinacea.

### BRIEF DESCRIPTION OF THE DRAWINGS

[0036] FIG. 1 shows the activity of recombinant LpSPP (SEQ ID NO: 8) and FaSPP (SEQ ID NO 7) on dephosphorylating Suc-6-P and Fru-6-P. The pET41a extract was the vector control.

[0037] FIG. 2 shows the peroxidase activity of FaPER3 (SEQ ID NO: 50) and LpPER5 (SEQ ID NO: 52) as determined by oxidation of ABTS. Horseradish peroxidase of known activity (Sigma, St Louis, Mich.) was used as a positive control and boiled samples as a negative control.

[0038] FIG. 3 shows PCR verification of transgenic N. benthamiana plants transformed with Lp6-SFT1 (SEQ ID NO: 3). Genomic DNA was isolated from kanamycin resistant T2 N. benthamiana plants and the Lp6-SFT1 fragment was amplified using specific PCR primers.

[0039] FIG. 4 shows PCR verification of transgenic N. benthamiana plants transformed with Lp1-SST (SEQ ID NO: 1). Genomic DNA was isolated from kanamycin resistant T2 N. benthamiana plants and the Lp1-SST fragment was amplified using specific PCR primers. Plant number 5 is a non-transgenic control.

[0040] FIG. 5 shows the fructan level in transgenic N. benthamiana lines transformed with Lp6-SFT1 (SEQ ID NO: 3) and Lp1-SST (SEQ ID NO: 1).

[0041] FIG. 6 shows the sucrose synthesizing activity of FaSPS-N (SEQ ID NO: 9) with and without SPP (SEQ ID NO: 8) in mammalian cell extracts. The non-transfected cells are controls.

[0042] FIG. 7 shows the sucrose cleaving activity of FaSUS1 (SEQ ID NO: 13) in mammalian cell extracts.

[0043] FIG. 8 shows the invertase activity for vacuolar invertase (LpSINV1, SEQ ID NO: 25) and two cell wall invertases (LpCWINV1 and FaCWINV4, SEQ ID NO: 17 and 19); absence of invertase activity from an empty vector (pPICZαA) control is also shown.

[0044] FIG. 9 shows relative levels of sinapoyl malate extracted from Arabidopsis leaf tissue and measured by HPLC. This demonstrates the absence of sinapoyl malate in the fah-1 mutant and restoration of sinapoyl malate in mutants complemented with LpF5H.

### DETAILED DESCRIPTION OF THE INVENTION

[0045] The polypeptides of the present invention, and the polynucleotides encoding the polypeptides, have activity in lignin, fructan and tannin biosynthetic pathways in plants. Using the methods and materials of the present invention, the lignin, fructan and/or tannin content of a plant may be modulated by modulating expression of polynucleotides of the present invention, or by modifying the polynucleotides or polypeptides encoded by polynucleotides. The isolated polynucleotides and polypeptides of the present invention may thus be usefully employed in the correction of nutritional imbalances associated with temperate pastures and to increase the yield of animal products from pastures.

[0046] The lignin, fructan and/or tannin content of a target organism, such as a plant, may be modified, for example, by incorporating additional copies of genes encoding enzymes involved in the lignin, fructan or tannin biosynthetic pathways into the genome of the target plant. Similarly, a modified lignin, fructan and/or tannin content can be obtained by transforming the target plant with anti-sense copies of such genes. In addition, the number of copies of genes encoding for different enzymes in the lignin, fructan and tannin biosynthetic pathways can be manipulated to modify the relative amount of each monomer unit synthesized, thereby leading to the formation of lignins, fructans or tannins having altered composition.

[0047] The present invention thus provides methods for modulating the polynucleotide and/or polypeptide content and composition of an organism, such methods involving stably incorporating into the genome of the organism a genetic construct comprising one or more polynucleotides of the present invention. In one embodiment, the target organism is a plant species, preferably a forage plant, more preferably a grass of the Lolium or Festuca species, and most preferably Lolium perenne or Festuca arundinacea. In related aspects, methods for producing a plant having an altered genotype or phenotype is provided, such methods comprising transforming a plant cell with a genetic construct of the present invention to provide a transgenic cell, and cultivating the transgenic cell under conditions conducive to regeneration and mature plant growth. Plants having an altered genotype or phenotype as a consequence of modulation of the level or content of a polynucleotide or polypeptide of the present invention compared to a wild-type organism, as well as components (seeds, etc.) of such plants, and the progeny of such plants, are contemplated by and encompassed within the present invention.

[0048] The isolated polynucleotides of the present invention have utility in genome mapping, in physical mapping, and in positional cloning of genes. Additionally, the polynucleotide sequences identified as SEQ ID NOS: 1-62 and 125-162 and their variants, may be used to design oligonucleotide probes and primers. Oligonucleotide probes and primers have sequences that are substantially complementary to the polynucleotide of interest over a certain portion of the polynucleotide. Oligonucleotide probes designed using the polynucleotides of the present invention may be employed to detect the presence and examine the expression patterns of genes in any organism having sufficiently similar DNA and RNA sequences in their cells using techniques that are well known in the art, such as slot blot DNA hybridization techniques. Oligonucleotide primers designed using the polynucleotides of the present invention may be used for PCR amplifications. Oligonucleotide probes and primers designed using the polynucleotides of the present invention may also be used in connection with various microarray technologies, including the microarray technology of Affymetrix (Santa Clara, Calif.).

[0049] In a first aspect, the present invention provides isolated polynucleotide sequences identified in the attached Sequence Listing as SEQ ID NO: 1-62 and 125-162, and polypeptide sequences identified in the attached Sequence Listing as SEQ ID NO: 63-124 and 163-190. The polynucleotides and polypeptides of the present invention have demonstrated similarity to the following polypeptides that are known to be involved in lignin, fructan and tannin biosynthetic processes:

TABLE 1

| SEQ ID NO | SEQ ID NO | | |
|---|---|---|---|
| Polynucleotide | Polypeptide | Category | Description |
| 1 and 125 | 63 and 163 | Fructan | Homolog of Sucrose: Sucrose 1-fructosyl- |
| | | biosynthesis | transferase (1-SST) isolated from Festuca |
| | | | arundinacea. They contain a typical signature |
| | | | of the glycosyl hydrolases family 32 (amino |
| | | | acid residues 120 to 133). The glycosyl |
| | | | hydrolases family 32 domain signature has a |
| | | | consensus of HYQPxxH/NxxNDPNG, where |
| | | | D is the active site residue (Henrissat, Biochem. |
| | | | J. 280: 309-316, 1991). |
| 2 | 64 | Fructan | Homolog of Sucrose: Sucrose 1-fructosyl- |
| | | biosynthesis | transferase (1-SST) isolated from Festuca |
| | | | arundinacea. It contains a typical signature of |
| | | | the glycosyl hydrolases family 32 (amino acid |
| | | | residues 120 to 133). The glycosyl hydrolases |
| | | | family 32 domain signature has a consensus of |
| | | | HYQPxxH/NxxNDPNG, where D is the active |
| | | | site residue (Henrissat, Biochem. J. 280: 309-316, |
| | | | 1991). |
| 3 and 126 | 65 and 164 | Fructan | Homolog of Sucrose: fructan 6-fructosyl- |
| | | biosynthesis | transferase (6-SFT) isolated from Festuca |
| | | | arundinacea. They contain a typical signature |
| | | | of the glycosyl hydrolases family 32 (amino |
| | | | acid residues 90 to 564). The glycosyl |
| | | | hydrolases family 32 domain signature has a |
| | | | consensus of HYQPxxH/NxxNDPNG, where |
| | | | D is the active site residue (Henrissat, Biochem. |
| | | | J. 280: 309-316, |
| | | | 1991). |
| 4 and 127 | 66 and 165 | Fructan | Homolog of Sucrose: fructan 6-fructosyl- |
| | | biosynthesis | transferase (6-SFT) isolated from Lolium |
| | | | perenne. They contain a typical signature of |
| | | | the glycosyl hydrolases family 32 (amino acid |
| | | | residues 96 to 107). The glycosyl hydrolases |
| | | | family 32 domain signature has a consensus of |
| | | | HYQPxxH/NxxNDPNG, where D is the active |
| | | | site residue (Henrissat, Biochem. J. 280: 309-316, |
| | | | 1991). |
| 5 | 67 | Fructan | Homolog of sucrose: fructan 6-fructosyl- |
| | | biosynthesis | transferase (6-SFT) isolated from Festuca |
| | | | arundinacea. |
| 6 and 128 | 68 and 166 | Fructan | Homolog of Sucrose: fructan 6-fructosyl- |
| | | biosynthesis | transferase (6-SFT) isolated from Lolium |
| | | | perenne. They contain a typical signature of |
| | | | the glycosyl hydrolases family 32 (amino acid |
| | | | residues 90 to 103). The glycosyl hydrolases |
| | | | family 32 domain signature has a consensus of |
| | | | HYQPxxH/NxxNDPNG, where D is the active |
| | | | site residue (Henrissat, Biochem. J. 280: 309-316, |
| | | | 1991). |
| 7 and 129 | 69 | Fructan | Homolog of Sucrose-6-phosphate phospho- |
| | | biosynthesis | hydrolase (SPP; EC 3.1.3.24) isolated from |
| | | | Festuca arundinacea. This enzyme belongs to |
| | | | the superfamily of hydrolases, and has the three |
| | | | conserved motifs found in these proteins |
| | | | (Galperin and Koonin, Trends Biochem Sci. |
| | | | 23: 127-129, 1998). Motif I (amino acid |
| | | | residues 10 to 19) contains conserved Asp and |
| | | | a Thr residues, motif II (amino acid residues 48 |
| | | | to 53) contains a conserved Thr residue, and |
| | | | Motif III (residues 167 to 220) contains |
| | | | conserved Lys (position 167) and Asp residues |
| | | | (position 202 and 206). These conserved |
| | | | amino acid residues are required for activity of |
| | | | the enzyme. |
| 8 | 70 | Fructan | Homolog of Sucrose-6-phosphate phospho- |
| | | biosynthesis | hydrolase (SPP; EC 3.1.3.24) isolated from |
| | | | Lolium perenne. This enzyme belongs to the |
| | | | superfamily of hydrolases, and has the three |
| | | | conserved motifs found in these proteins |
| | | | (Galperin and Koonin, Trends Biochem Sci. |
| | | | 23: 127-129, 1998). Motif I (residues 10 to 19) |
| | | | contains conserved Asp and Thr residues, motif |
| | | | II (amino acid residues 48 to 53) contains a |
| | | | conserved Thr residue, and Motif III (amino |
| | | | acid residues 167 to 220) contains conserved |
| | | | Lys (position 167) and Asp residues (position |
| | | | 202 and 206). These conserved amino acid |
| | | | residues are required for activity of the |
| | | | enzyme. |
| 9 and 130 | 71 | Fructan | Homolog of sucrose phosphate synthase (SPS- |
| | | biosynthesis | 1) isolated from Festuca arundinacea. |
| 10 and 131 | 72 and 167 | Fructan | Homolog of sucrose phosphate synthase (SPS- |
| | | biosynthesis | 1) isolated from Lolium perenne and that is |
| | | | involved in the sucrose synthesis pathway. |
| 11 and 132 | 73 and 168 | Fructan | Homolog of sucrose phosphate synthase (SPS- |
| | | biosynthesis | N) isolated from Lolium perenne and that is |
| | | | involved in the sucrose synthesis pathway. |
| 12 and 133 | 74 and 169 | Fructan | Homolog of sucrose synthase (SuS) isolated |
| | | biosynthesis | from Lolium perenne. These molecules contain |
| | | | a leucine zipper motif in amino acid position |
| | | | 191 to 213. Leucine zipper motifs are present |
| | | | in many gene regulatory proteins (Landschulz |
| | | | et al., Science 240: 1759-1764, 1988). |
| 13 | 75 | Fructan | Homolog of sucrose synthase (SuS) isolated |
| | | biosynthesis | from Festuca arundinacea. This molecule |
| | | | contains a leucine zipper motif in amino acid |
| | | | position 191 to 213. Leucine zipper motifs are |
| | | | present in many gene regulatory proteins |
| | | | (Landschulz et al., Science 240: 1759-1764, |
| | | | 1988). |
| 14 and 134 | 76 and 170 | Fructan | Homolog of sucrose synthase (SuS) isolated |
| | | biosynthesis | from Lolium perenne. |
| 15 | 77 | Fructan | Homolog of sucrose synthase (SuS) isolated |
| | | biosynthesis | from Festuca arundinacea. |
| 16 and 135 | 78 and 171 | Fructan | Homologue of cell wall invertase (CWINV) |
| | | biosynthesis | isolated from Festuca arundinacea that belongs |
| | | | to the family 32 of glycosyl hydrolases. These |
| | | | molecules contain a conserved peptide domain |
| | | | in amino acid residues 139 to 144 and 242-247, |
| | | | respectively. The consensus peptide domain of |
| | | | invertases is (WVYL)EC(PIL)D (LFI) with the |
| | | | conserved Cys residue part of the catalytic |
| | | | domain (Sturm, Plant Physiol. 121: 1-7, 1999). |
| 17 | 79 | Fructan | Homolog of cell wall invertase (CWINV) |
| | | biosynthesis | isolated from Lolium perenne that belongs to |
| | | | the family 32 of glycosyl hydrolases. This |
| | | | molecule contains a conserved pentapeptide |
| | | | bF-motif at amino acid residues 70 to 74 and a |
| | | | peptide domain in amino acid residues 250 to |
| | | | 255. The consensus peptide domain of |
| | | | invertases is (WVYL)EC(PIL)D(LFI) with the |
| | | | conserved Cys residue part of the catalytic |
| | | | domain (Sturm, Plant Physiol. 121: 1-7, 1999). |
| | | | It also contains a glycosyl hydrolases family 32 |
| | | | signature region at amino acids 61 to 74 that |
| | | | contains a conserved His residue important in |
| | | | the catalytic reaction (Reddy and Maley, J. |
| | | | Biol. Chem. 265: 10817-10120, 1990). |
| 18 and 136 | 80 and 172 | Fructan | Homolog of cell wall invertase (CWINV) |
| | | biosynthesis | isolated from Lolium perenne that belongs to |
| | | | the family 32 of glycosyl hydrolases. |
| 19 | 81 | Fructan | Homolog of cell wall invertase (CWINV) |
| | | biosynthesis | isolated from Festuca arundinacea that belongs |
| | | | to the family 32 of glycosyl hydrolases. This |
| | | | molecule contains a conserved pentapeptide |
| | | | bF-motif at amino acid residues 60 to 64. The |
| | | | consensus peptide domain of invertases is |
| | | | (WVYL)EC(PIL)D(LFI) with the conserved |
| | | | Cys residue part of the catalytic domain |
| | | | (Sturm, Plant Physiol. 121: 1-7, 1999). It also |
| | | | contains a glycosyl hydrolases family 32 |
| | | | signature region at amino acids 51 to 64 that |
| | | | contains a conserved His residue important in |
| | | | the catalytic reaction (Reddy and Maley, J. |
| | | | Biol. Chem. 265: 10817-10120, 1990). A signal |
| | | | peptide is present in amino acid residues 1 to |
| | | | 24. |
| 20 and 137 | 82 and 173 | Fructan | Homolog of cell wall invertase (CWINV) |
| | | biosynthesis | isolated from Festuca arundinacea that belongs |
| | | | to the family 32 of glycosyl hydrolases. These |
| | | | molecules contain a peptide domain in amino |
| | | | acid residues 61 to 66and 242-247, |
| | | | respectively. The consensus peptide domain of |
| | | | invertases is (WVYL)EC(PIL)D(LFI) with the |
| | | | conserved Cys residue part of the catalytic |
| | | | domain (Sturm, Plant Physiol 121: 1-7, 1999). |
| 21 | 83 | Fructan | Homolog of cell wall invertase (CWINV) |
| | | biosynthesis | isolated from Festuca arundinacea that belongs |
| | | | to the family 32 of glycosyl hydrolases. This |
| | | | molecule contains a conserved pentapeptide |
| | | | bF-motif at amino acid residues 73 to 77 and a |
| | | | peptide domain in amino acid residues 253 to |
| | | | 258. The consensus peptide domain of |
| | | | invertases is (WVYL)EC(PIL)D-(LFI) with the |
| | | | conserved Cys residue part of the catalytic |
| | | | domain (Sturm, Plant Physiol. 121: 1-7, 1999). |
| | | | It also contains a glycosyl hydrolases family 32 |
| | | | signature region at amino acid 64 to 77 that |
| | | | contains a conserved His residue important in |
| | | | the catalytic reaction (Reddy and Maley, J. |
| | | | Biol. Chem. 265: 10817-10120, 1990). |
| 22 and 138 | 84 and 174 | Fructan | Homolog of cell wall invertase (CWINV) |
| | | biosynthesis | isolated from Lolium perenne that belongs to |
| | | | the family 32 of glycosyl hydrolases. These |
| | | | molecules contain a peptide domain in amino |
| | | | acid residues 174 to 179 and 234 to 239, |
| | | | respectively. The consensus peptide domain of |
| | | | invertases is (WVYL)EC- (PIL)D(LFI) with |
| | | | the conserved Cys residue part of the catalytic |
| | | | domain (Sturm, Plant Physiol. 121: 1-7, 1999). |
| 23 | 85 | Fructan | Homolog of cell wall invertase (CWINV) |
| | | biosynthesis | isolated from Festuca arundinacea that belongs |
| | | | to the family 32 of glycosyl hydrolases. This |
| | | | molecule contains a conserved pentapeptide |
| | | | bF-motif at amino acid residues 56 to 60. The |
| | | | consensus peptide domain of invertases is |
| | | | (WVYL)EC(PIL)D(LFI) with the conserved |
| | | | Cys residue part of the catalytic domain |
| | | | (Sturm, Plant Physiol. 121: 1-7, 1999). It also |
| | | | contains a glycosyl hydrolases family 32 |
| | | | signature region at amino acid 47 to 60 that |
| | | | contains a conserved His residue that is |
| | | | important in the catalytic reaction (Reddy and |
| | | | Maley, J. Biol. Chem. 265: 10817-10120, |
| | | | 1990). A signal peptide is present in amino |
| | | | acid residues 1 to 22. |
| 24 and 139 | 86 and 175 | Fructan | Homolog of cell wall invertase (CWINV) |
| | | biosynthesis | isolated from Lolium perenne that belongs to |
| | | | the family 32 of glycosyl hydrolases. These |
| | | | molecules contain a conserved pentapeptide |
| | | | bF-motif at amino acid residues 244 to 249. |
| | | | The consensus peptide domain of invertases is |
| | | | (WVYL)EC(PIL)D(LFI) with the conserved |
| | | | Cys residue part of the catalytic domain |
| | | | (Sturm, Plant Physiol. 121: 1-7, 1999). They |
| | | | also contain a glycosyl hydrolases family 32 |
| | | | signature region at amino acid 56 to 69 that |
| | | | contains a conserved His residue that is |
| | | | important in the catalytic reaction (Reddy and |
| | | | Maley, J. Biol. Chem. 265: 10817-10120, |
| | | | 1990). A signal peptide is present in amino |
| | | | acid residues 1 to 25. |
| 25 and 140 | 87 and 176 | Fructan | Homolog of vacuolar invertase (SINV) isolated |
| | | biosynthesis | from Lolium perenne that belongs to the family |
| | | | 32 of glycosyl hydrolases. These molecules |
| | | | contain a conserved pentapeptide bF-motif at |
| | | | amino acid residues 136 to 140 and 138 to 142, |
| | | | respectively and a peptide domain in amino |
| | | | acid residues 317 to 322 and 319 to 324, |
| | | | respectively. The consensus peptide domain of |
| | | | invertases is (WVYL)EC(PIL)D(LFI) with the |
| | | | conserved Cys residue part of the catalytic |
| | | | domain (Sturm, Plant Physiol. 121: 1-7, 1999). |
| | | | It also contains a glycosyl hydrolases family 32 |
| | | | signature region at amino acid 127 to 140 and |
| | | | 129 to 142 that contains a conserved His |
| | | | residue that is important in the catalytic |
| | | | reaction (Reddy and Maley, J. Biol. Chem. |
| | | | 265: 10817-10120, 1990). |
| 26 and 141 | 88 and 177 | Fructan | Homolog of invertase (SINV) isolated from |
| | | biosynthesis | Lolium perenne that belongs to the family 32 of |
| | | | glycosyl hydrolases. These molecules contain a |
| | | | peptide domain in amino acid residues 143 to |
| | | | 148 and 184 to 189, respectively. The |
| | | | consensus peptide domain of invertases is |
| | | | (WVYL)EC(PIL)D(LFI) with the conserved |
| | | | Cys residue part of the catalytic domain |
| | | | (Sturm, Plant Physiol. 121: 1-7, 1999). |
| 27 | 89 | Lignin/Tannin | Homolog of 4-Coumarate: CoA ligase (4CL, |
| | | biosynthesis | EC 6.2.1.12) isolated from Lolium perenne The |
| | | | molecule has two conserved AMP binding |
| | | | regions at amino acid residues 182 to 193 and |
| | | | 383 to 389 (Hu et al., Proc. Natl. Acad. Sci. |
| | | | USA 95: 5407-5412, 1998). The AMP-binding |
| | | | domain signature consists of two binding site |
| | | | motifs. The consensus of the first motif is |
| | | | LPYSSGTTGLPK (Etchegaray et al., |
| | | | Biochem. Mol. Biol. Int. 44: 235-243, 1998). |
| | | | The region very rich in glycine, serine, and |
| | | | threonine followed by a conserved lysine. In |
| | | | most of these proteins, the residue that follows |
| | | | the Lys at the end of the pattern is a Gly. The |
| | | | second motif consensus sequence is |
| | | | GEIC(V/I)RG (Hu et al., Proc. Natl. Acad. Sci. |
| | | | USA 95: 5407-5412, 1998). |
| /28 and 142 | 90 | Lignin/Tannin | Homolog of 4-Coumarate: CoA ligase (4CL, |
| | | biosynthesis | EC 6.2.1.12) isolated from Lolium perenne. |
| | | | The molecule has two conserved AMP binding |
| | | | regions at amino acid residues 195 to 206 and |
| | | | 395 to 401 (Hu et al., Proc. Natl. Acad. Sci. |
| | | | USA 95: 5407-5412, 1998). The AMP-binding |
| | | | domain signature consists of two binding site |
| | | | motifs. The consensus of the first motif is |
| | | | LPYSSGTTGLPK (Etchegaray et al., |
| | | | Biochem. Mol. Biol. Int. 44: 235-243, 1998). |
| | | | The region very rich in glycine, serine, and |
| | | | threonine followed by a conserved lysine. In |
| | | | most of these proteins, the residue that follows |
| | | | the Lys at the end of the pattern is a Gly. The |
| | | | second motif consensus sequence is |
| | | | GEIC(V/I)RG (Hu et al., Proc. Natl. Acad. Sci. |
| | | | USA 95: 5407-5412, 1998). |
| 29 | 91 | Lignin/Tannin | Homolog of 4-Coumarate: CoA ligase (4CL, |
| | | biosynthesis | EC 6.2.1.12) isolated from Festuca |
| | | | arundinacea. The molecule has two conserved |
| | | | AMP binding regions at amino acid residues |
| | | | 195 to 206 and 395 to 401 (Hu et al., Proc. |
| | | | Natl. Acad. Sci. USA 95: 5407-5412, 1998). |
| | | | The AMP-binding domain signature consists of |
| | | | two binding site motifs. The consensus of the |
| | | | first motif is LPYSSGTTGLPK (Etchegaray et |
| | | | al., Biochem. Mol. Biol. Int. 44: 235-243, 1998). |
| | | | The region very rich in glycine, serine, and |
| | | | threonine followed by a conserved lysine. In |
| | | | most of these proteins, the residue that follows |
| | | | the Lys at the end of the pattern is a Gly. The |
| | | | second motif consensus sequence is |
| | | | GEIC(V/I)RG (Hu et al., Proc. Natl. Acad. Sci. |
| | | | USA 95: 5407-5412, 1998). |
| 30 and 143 | 92 and 178 | Lignin/Tannin | Homolog of 4-Coumarate: CoA ligase (4CL, |
| | | biosynthesis | EC 6.2.1.12) isolated from Lolium. The |
| | | | molecules have two conserved AMP binding |
| | | | regions at amino acid residues 194 to 205 and |
| | | | 394 to 400 (Hu et al., Proc. Natl. Acad. Sci. |
| | | | USA 95: 5407-5412, 1998). The AMP-binding |
| | | | domain signature consists of two binding site |
| | | | motifs. The consensus of the first motif is |
| | | | LPYSSGTTGLPK (Etchegaray et al., |
| | | | Biochem. Mol. Biol. Int. 44: 235-243, 1998). |
| | | | The region very rich in glycine, serine, and |
| | | | threonine followed by a conserved lysine. In |
| | | | most of these proteins, the residue that follows |
| | | | the Lys at the end of the pattern is a Gly. The |
| | | | second motif consensus sequence is |
| | | | GEIC(V/I)RG (Hu et al., Proc. Natl. Acad. Sci. |
| | | | USA 95: 5407-5412, 1998). |
| 31 | 93 | Lignin/Tannin | Homolog of 4-Coumarate: CoA ligase (4CL, |
| | | biosynthesis | EC 6.2.1.12) isolated from Festuca |
| | | | arundinacea. The molecule has two conserved |
| | | | AMP binding regions at amino acid residues |
| | | | 194 to 206 and 482 to 490 (Hu et al., Proc. |
| | | | Natl. Acad. Sci. USA 95: 5407-5412, 1998). |
| | | | The AMP-binding domain signature consists of |
| | | | two binding site motifs. The consensus of the |
| | | | first motif is LPYSSGTTGLPK (Etchegaray et |
| | | | al., Biochem. Mol. Biol. Int. 44: 235-243, |
| | | | 1998). The region very rich in glycine, serine, |
| | | | and threonine followed by a conserved lysine. |
| | | | In most of these proteins, the residue that |
| | | | follows the Lys at the end of the pattern is a |
| | | | Gly. The second motif consensus sequence is |
| | | | GEIC(V/I)RG (Hu et al., Proc. Natl. Acad. Sci. |
| | | | USA 95: 5407-5412, 1998). |
| 32 and 144 | 94 and 179 | Lignin/Tannin | Homolog of cinnamic acid 4-hydroxylase |
| | | biosynthesis | (C4H) isolated from Lolium perenne. The |
| | | | molecules have a conserved cytochrome P450 |
| | | | region in amino acids 436 to 445 that contains |
| | | | a conserved Cys residue involved in heme |
| | | | binding (Miles et al., Biochim Biophys Acta |
| | | | 1543: 383-407, 2000). |
| 33 | 95 | Lignin/Tannin | Homolog of cinnamic acid 4-hydroxylase |
| | | biosynthesis | (C4H) isolated from Festuca arundinacea. The |
| | | | molecule has a conserved Cytochrome P450 |
| | | | region in amino acids 440 to 449 that contains |
| | | | a conserved Cys residue involved in heme |
| | | | binding. The cytochrome P450 cysteine heme- |
| | | | iron ligand signature consensus is |
| | | | FGxGRRSCPG where the conserved C is the |
| | | | heme iron ligand (Miles et al., Biochim. |
| | | | Biophys. Acta 1543: 383-407, 2000). It also |
| | | | contains an aldehyde dehydrogenases active |
| | | | site (Hempel et al., Adv. Exp. Med. Biol. |
| | | | 436: 53-59, 1999) at amino acid residues 428 to |
| | | | 435. A hydrophobic signal peptide region is |
| | | | present in amino acid residues 1 to 24. |
| 34 and 145 | 96 and 180 | Lignin | Homolog of cinnamyl-alcohol dehydrogenase |
| | | biosynthesis | (CAD; EC 1.1.1.195) isolated from Lolium |
| | | | perenne. These molecules contain a conserved |
| | | | zinc-containing alcohol dehydrogenase domain |
| | | | (Joernvall et al., Eur. J. Biochem. 167: 195-201, |
| | | | 1987) in amino acid residues 69 to 83, with a |
| | | | conserved His residue at position 70. They also |
| | | | contain a cytochrome C family heme-binding |
| | | | site signature (Mathews, Prog. Biophys. Mol. |
| | | | Biol. 45: 1-56, 1985) in residues 45 to 50. |
| 35 | 97 | Lignin | Homolog of cinnamyl-alcohol dehydrogenase |
| | | biosynthesis | (CAD; EC 1.1.1.195) isolated from Festuca |
| | | | arundinacea. CAD belongs to the family of |
| | | | zinc-binding dehydrogenases. This molecule |
| | | | contains a conserved zinc-containing alcohol |
| | | | dehydrogenases domain (Joernvall et al., Eur. |
| | | | J. Biochem. 167: 195-201, 1987) in amino acid |
| | | | residues 69 to 83, with a conserved His residue |
| | | | at position 70. It also contains a Cytochrome C |
| | | | family heme-binding site signature. The |
| | | | cytochrome C family heme-binding site |
| | | | signature is CGICHT. In the cytochrome C |
| | | | protein family, the heme group is covalently |
| | | | attached by thioether bonds to two conserved |
| | | | cysteine residues. The consensus sequence for |
| | | | this site is Cys-X—X-Cys-His and the histidine |
| | | | residue is one of the two axial ligands of the |
| | | | heme iron. This arrangement is shared by all |
| | | | proteins known to belong to cytochrome C |
| | | | family (Mathews, Prog. Biophys. Mol. Biol. |
| | | | 45: 1-56, 1985). |
| 36 and 146 | 98 | Lignin | Homolog of caffeoyl coenzyme A O- |
| | | biosynthesis | methyltransferase (CCoAOMT) (EC 2.1.1.104) |
| | | | isolated from Lolium perenne. |
| 37 | 99 | Lignin | Homolog of caffeoyl coenzyme A O- |
| | | biosynthesis | methyltransferase (CCoAOMT) (EC 2.1.1.104) |
| | | | isolated from Festuca arundinacea. |
| 38 and 147 | 100 and 181 | Lignin | Homolog of cinnamoyl CoA: NADP |
| | | biosynthesis | oxidoreductase (CCR, EC 1.2.1.44) isolated |
| | | | from Lolium perenne that catalyzes the |
| | | | conversion of cinnamoyl CoA esters to their |
| | | | corresponding cinnamaldehydes in the first |
| | | | specific step in the synthesis of the lignin |
| | | | monomers. A hydrophobic region typical of a |
| | | | signal peptide is present in amino acid residues |
| | | | 1 to 24. |
| 39 and 148 | 101 | Lignin | Homolog of cinnamoyl CoA: NADP |
| | | biosynthesis | oxidoreductase (CCR, EC 1.2.1.44) isolated |
| | | | from Festuca arundinacea that catalyzes the |
| | | | conversion of cinnamoyl CoA esters to their |
| | | | corresponding cinnamaldehydes in the first |
| | | | specific step in the synthesis of the lignin |
| | | | monomers. |
| 40 and 149 | 102 and 182 | Lignin | Homolog of caffeic acid 3-O-methyltransferase |
| | | biosynthesis | (COMT1) isolated from Festuca arundinacea |
| | | | A conserved consensus phosphopantetheine |
| | | | attachment site was identified in amino acid |
| | | | residues 47 to 62. This domain is involved in |
| | | | the attachment of activated fatty acid and |
| | | | amino-acid groups, with the Ser residue at |
| | | | position 52 crucial for the phosphopantetheine |
| | | | attachment (Pugh and Wakil, J. Biol. Chem. |
| | | | 240: 4727-4733, 1965). |
| 41 and 150 | 103 | Lignin | Homolog of caffeic acid 3-O-methyltransferase |
| | | biosynthesis | (COMT1) isolated from Lolium perenne A |
| | | | conserved consensus phosphopantetheine |
| | | | attachment site was identified in amino acid |
| | | | residues 47 to 62. This domain is involved in |
| | | | the attachment of activated fatty acid and |
| | | | amino-acid groups, with the Ser residue at |
| | | | position 52 crucial for the phosphopantetheine |
| | | | attachment (Pugh and Wakil, J. Biol. Chem. |
| | | | 240: 4727-4733, 1965). |
| 42 | 104 | Lignin | Homolog of caffeic acid 3-O-methyltransferase |
| | | biosynthesis | (COMT1) isolated from Festuca arundinacea |
| | | | A conserved consensus phosphopantetheine |
| | | | attachment site was identified in amino acid |
| | | | residues 47 to 62. This domain is involved in |
| | | | the attachment of activated fatty acid and |
| | | | amino-acid groups, with the Ser residue at |
| | | | position 52 crucial for the phosphopantetheine |
| | | | attachment (Pugh and Wakil, J. Biol. Chem. |
| | | | 240: 4727-4733, 1965). |
| 43 | 105 | Lignin | Homolog of caffeic acid 3-O-methyltransferase |
| | | biosynthesis | (COMT1) isolated from Lolium perenne A |
| | | | conserved consensus phosphopantetheine |
| | | | attachment site was identified in amino acid |
| | | | residues 47 to 62. This domain is involved in |
| | | | the attachment of activated fatty acid and |
| | | | amino-acid groups, with the Ser residue at |
| | | | position 52 crucial for the phosphopantetheine |
| | | | attachment (Pugh and Wakil, J. Biol. Chem. |
| | | | 240: 4727-4733, 1965). |
| 44 and 151 | 106 and 183 | Lignin | Homolog of ferulate 5-hydroxylase (F5H) |
| | | biosynthesis | isolated from Lolium perenne. The molecules |
| | | | have a conserved cytochrome P450 region in |
| | | | amino acids 463 to 472 that contains a |
| | | | conserved Cys residue involved in heme |
| | | | binding (Miles et al., Biochim Biophys Acta |
| | | | 1543: 383-407, 2000). A signal peptide is |
| | | | present in amino acid residues 1 to 30. |
| 45 | 107 | Lignin | Homolog of ferulate 5-hydroxylase (F5H) |
| | | biosynthesis | isolated from Festuca arundinaceae. The |
| | | | molecule has a conserved cytochrome P450 |
| | | | region in amino acids 462 to 471 that contains |
| | | | a conserved Cys residue involved in heme |
| | | | binding (Miles et al., Biochim Biophys Acta |
| | | | 1543: 383-407, 2000). A signal peptide is |
| | | | present in amino acid residues 1 to 30. |
| 46 and 152 | 108 | Lignin/Tannin | Homolog of phenylalanine ammonia-lyase (EC |
| | | biosynthesis | 4.3.1.5) (PAL) isolated from Lolium perenne. |
| | | | The polypeptide has a conserved PAL-histidase |
| | | | region in amino acid residues 193 to 209. |
| 47 and 153 | 109 and 184 | Lignin/Tannin | Homolog of phenylalanine ammonia-lyase (EC |
| | | biosynthesis | 4.3.1.5) (PAL) isolated from Festuca |
| | | | arundinacea. A conserved phenylalanine and |
| | | | histidine ammonia-lyases active site signature |
| | | | has been identified in amino acid residues 195 |
| | | | to 210. |
| 48 | 110 | Lignin | Homolog of peroxidase (PER) isolated from |
| | | biosynthesis | Festuca arundinacea. The conserved |
| | | | peroxidase I region is present in amino acid |
| | | | residues 188 to 199 and contains a conserved |
| | | | His residue at position 196 in the active site, |
| | | | and the conserved peroxidase 2 region is |
| | | | present in amino acid residues 60 to 71, with a |
| | | | conserved His residue at position 69 that is |
| | | | involved in heme binding (Kimura and Ikeda- |
| | | | Saito, Proteins 3: 113-120, 1988). A signal |
| | | | peptide is present in amino acid residues 1 to |
| | | | 27. |
| 49 | 111 | Lignin | Homolog of peroxidase (PER) isolated from |
| | | biosynthesis | Lolium perenne. The conserved peroxidase I |
| | | | region is present in amino acid residues 199 to |
| | | | 209 and contains a conserved His residue at |
| | | | position 208 in the active site. A signal peptide |
| | | | is present in amino acid residues 1 to 33. |
| 50 | 112 | Lignin | Homolog of peroxidase (PER) isolated from |
| | | biosynthesis | Festuca arundinacea. The conserved |
| | | | peroxidase I region is present in amino acid |
| | | | residues 180 to 190 and contains a conserved |
| | | | His residue at position 188 in the active site, |
| | | | and the conserved peroxidase 2 region is |
| | | | present in amino acid residues 55 to 66, with a |
| | | | conserved His residue at position 64 that is |
| | | | involved in heme binding (Kimura and Ikeda |
| | | | Saito, Proteins 3: 113-120, 1988). A signal |
| | | | peptide is present in amino acid residues 1 to |
| | | | 22. |
| 51 and 154 | 113 | Lignin | Homolog of peroxidase (PER) isolated from |
| | | biosynthesis | Lolium perenne. The conserved peroxidase I |
| | | | region is present in amino acid residues 199 to |
| | | | 209 and contains a conserved His residue at |
| | | | position 207 in the active site, and the |
| | | | conserved peroxidase 2 region is present in |
| | | | amino acid residues 70 to 80, with a conserved |
| | | | His residue at position 78 that is involved in |
| | | | heme binding (Kimura and Ikeda-Saito, |
| | | | Proteins 3: 113-120, 1988). A signal peptide is |
| | | | present in amino acid residues 1 to 20. |
| 52 and 155 | 114 | Lignin | Homolog of peroxidase (PER) isolated from |
| | | biosynthesis | Lolium perenne. The conserved peroxidase I |
| | | | region is present in amino acid residues 198 to |
| | | | 208 and contains a conserved His residue at |
| | | | position 206 in the active site (Kimura and |
| | | | Ikeda-Saito, Proteins 3: 113-120, 1988). A |
| | | | signal peptide is present in amino acid residues |
| | | | 1 to 34. |
| 53, 156, and | 115, 185, and | Lignin | Homolog of peroxidase (PER) isolated from |
| 162 | 190 | biosynthesis | Lolium perenne. The conserved peroxidase I |
| | | | region is present in amino acid residues 157 to |
| | | | 168, 188 to 199, and 190 to 201, respectively |
| | | | and contain a conserved His residue at position |
| | | | 165, 196 and 198, respectively in the active |
| | | | site, and the conserved peroxidase 2 region is |
| | | | present in amino acid residues 29 to 41, 60 to |
| | | | 72 and 62 to 74, respectively, with a conserved |
| | | | His residue at position 38, 69 and 71, |
| | | | respectively that is involved in heme binding |
| | | | (Kimura and Ikeda-Saito, Proteins 3: 113-120, |
| | | | 1988). |
| 54 | 116 | Lignin | Homolog of peroxidase (PER) isolated from |
| | | biosynthesis | Festuca arundinacea. The conserved |
| | | | peroxidase I region is present in amino acid |
| | | | residues 176 to 186 and contains a conserved |
| | | | His residue at position 184 in the active site, |
| | | | and the conserved peroxidase 2 region is |
| | | | present in amino acid residues 55 to 67, with a |
| | | | conserved His residue at position 64 that is |
| | | | involved in heme binding (Kimura and Ikeda- |
| | | | Saito, Proteins 3: 113-120, 1988). A signal |
| | | | peptide is present in amino acid residues 1 to |
| | | | 22. |
| 55 | 117 | Tannin | Homolog of chalcone isomerase (CHI) isolated |
| | | Biosynthesis | from Lolium perenne. The molecule contains a |
| | | | chalcone isomerase region at amino acid |
| | | | residues 1 to 213. |
| 56 | 118 | Tannin | Homolog of chalcone isomerase (CHI). The |
| | | Biosynthesis | molecule contains a chalcone isomerase region |
| | | | at amino acid residues 23 to 235. |
| 57 and 157 | 119 and 186 | Tannin | Homolog of Chalcone Synthase (CHS) isolated |
| | | Biosynthesis | from Lolium perenne and that is an important |
| | | | enzyme in flavonoid synthesis. The molecules |
| | | | contain a conserved chalcone synthase active |
| | | | site (Lanz et al., J. Biol. Chem. 266: 9971-9976, |
| | | | 1991) at amino acid residues 166 to 175, with |
| | | | the conserved Cys residue at position 167. |
| 58 and 158 | 120 and 187 | Tannin | Homolog of dihydroflavonal-4-reductase |
| | | Biosynthesis | (DFR) isolated from Festuca arundinacea. |
| 59 and 159 | 121 and 188 | Tannin | Homolog of dihydroflavonal-4-reductase |
| | | Biosynthesis | (DFR) isolated from Lolium perenne. |
| 60 and 160 | 122 and 189 | Tannin | Homolog of dihydroflavonal-4-reductase |
| | | Biosynthesis | (DFR) isolated from Lolium perenne. These |
| | | | molecules contain a conserved ATP/GTP |
| | | | binding site at amino acid residues 84 to 91 and |
| | | | 86 to 93, respectively, known as the “A” |
| | | | sequence (Walker et al., EMBO J. 1: 945-951, |
| | | | 1982) or “P-loop” (Saraste et al., Trends |
| | | | Biochem. Sci. 15: 430-434, 1990). |
| 61 and 161 | 123 | Tannin | Homolog of flavanone 3-βhydroxylase (F3βH) |
| | | biosynthesis | isolated from Lolium perenne. |
| 62 | 124 | Tannin | Homolog of flavanone 3-βhydroxylase (F3βH) |
| | | Biosynthesis | isolated from Festuca arundinacea. |

[0050] All the polynucleotides and polypeptides provided by the present invention are isolated and purified, as those terms are commonly used in the art. Preferably, the polypeptides and polynucleotides are at least about 80% pure, more preferably at least about 90% pure, and most preferably at least about 99% pure.

[0051] The word “polynucleotide(s),” as used herein, means a polymeric collection of nucleotides, and includes DNA and corresponding RNA molecules and both single and double stranded molecules, including RNAi, HnRNA and mRNA molecules, sense and anti-sense strands of DNA and RNA molecules, and comprehends cDNA, genomic DNA, and wholly or partially synthesized polynucleotides. A polynucleotide of the present invention may be an entire gene, or any portion thereof. As used herein, a “gene” is a DNA sequence which codes for a functional protein or RNA molecule. Operable anti-sense polynucleotides may comprise a fragment of the corresponding polynucleotide, and the definition of “polynucleotide” therefore includes all operable anti-sense fragments. Anti-sense polynucleotides and techniques involving anti-sense polynucleotides are well known in the art and are described, for example, in Robinson-Benion et al., Methods in Enzymol. 254(23): 363-375, 1995 and Kawasaki et al., Artific. Organs 20(8): 836-848, 1996.

[0052] In specific embodiments, the present invention provides isolated polynucleotides comprising a sequence of SEQ ID NO: 1-62 and 125-162; polynucleotides comprising variants of SEQ ID NO: 1-62 and 125-162; polynucleotides comprising extended sequences of SEQ ID NO: 1-62 and 125-162 and their variants, oligonucleotide primers and probes corresponding to the sequences set out in SEQ ID NO: 1-62 and 125-162 and their variants, polynucleotides comprising at least a specified number of contiguous residues of any of SEQ ID NO: 1-62 and 125-162 (x-mers), and polynucleotides comprising extended sequences which include portions of the sequences set out in SEQ ID NO: 1-62 and 125-162, all of which are referred to herein, collectively, as “polynucleotides of the present invention.” Polynucleotides that comprise complements of such polynucleotide sequences, reverse complements of such polynucleotide sequences, or reverse sequences of such polynucleotide sequences, together with variants of such sequences, are also provided.

[0053] The definition of the terms “complement(s),” “reverse complement(s),” and “reverse sequence(s),” as used herein, is best illustrated by the following example. For the sequence 5′ AGGACC 3′, the complement, reverse complement, and reverse sequence are as follows:

| | |
|---|---|
| complement | 3′ TCCTGG 5′ |
| reverse complement | 3′ GGTCCT 5′ |
| reverse sequence | 5′ CCAGGA 3′. |

[0054] Preferably, sequences that are complements of a specifically recited polynucleotide sequence are complementary over the entire length of the specific polynucleotide sequence.

[0055] As used herein, the term “x-mer,” with reference to a specific value of “x,” refers to a polynucleotide comprising at least a specified number (“x”) of contiguous residues of: any of the polynucleotides provided in SEQ ID NO: 1-62 and 125-162. The value of x may be from about 20 to about 600, depending upon the specific sequence.

[0056] Polynucleotides of the present invention comprehend polynucleotides comprising at least a specified number of contiguous residues (x-mers) of any of the polynucleotides identified as SEQ ID NO: 1-62 and 125-162, or their variants. Similarly, polypeptides of the present invention comprehend polypeptides comprising at least a specified number of contiguous residues (x-mers) of any of the polypeptides identified as SEQ ID NO: 63-124 and 163-190. According to preferred embodiments, the value of x is at least 20, more preferably at least 40, more preferably yet at least 60, and most preferably at least 80. Thus, polynucleotides of the present invention include polynucleotides comprising a 20-mer, a 40-mer, a 60-mer, an 80-mer, a 100-mer, a 120-mer, a 150-mer, a 180-mer, a 220-mer, a 250-mer; or a 300-mer, 400-mer, 500-mer or 600-mer of a polynucleotide provided in SEQ ID NO: 1-62 and 125-162, or a variant of one of the polynucleotides corresponding to the polynucleotides provided in SEQ ID NO: 1-62 and 125-162. Polypeptides of the present invention include polypeptides comprising a 20-mer, a 40-mer, a 60-mer, an 80-mer, a 100-mer, a 120-mer, a 150-mer, a 180-mer, a 220-mer, a 250-mer; or a 300-mer, 400-mer, 500-mer or 600-mer of a polypeptide provided in SEQ ID NO: 63-124 and 163-190, or a variant thereof.

[0057] Polynucleotides of the present invention were isolated by high throughput sequencing of cDNA libraries comprising forage grass tissue collected from Lolium perenne and Festuca arundinacea. Some of the polynucleotides of the present invention may be “partial” sequences, in that they do not represent a full-length gene encoding a full-length polypeptide. Such partial sequences may be extended by analyzing and sequencing various DNA libraries using primers and/or probes and well known hybridization and/or PCR techniques. Partial sequences may be extended until an open reading frame encoding a polypeptide, a full-length polynucleotide and/or gene capable of expressing a polypeptide, or another useful portion of the genome is identified. Such extended sequences, including full-length polynucleotides and genes, are described as “corresponding to” a sequence identified as one of the sequences of SEQ ID NO: 1-62 and 125-162 or a variant thereof, or a portion of one of the sequences of SEQ ID NO: 1-62 and 125-162 or a variant thereof, when the extended polynucleotide comprises an identified sequence or its variant, or an identified contiguous portion (x-mer) of one of the sequences of SEQ ID NOS: 1-62 and 125-162 or a variant thereof. Similarly, RNA sequences, reverse sequences, complementary sequences, anti-sense sequences and the like, corresponding to the polynucleotides of the present invention, may be routinely ascertained and obtained using the cDNA sequences identified as SEQ ID NOS: 1-62 and 125-162.

[0058] The polynucleotides identified as SEQ ID NOS: 1-62 and 125-162 contain open reading frames (“ORFs”) or partial open reading frames encoding polypeptides and functional portions of polypeptides. Additionally, open reading frames encoding polypeptides may be identified in extended or full length sequences corresponding to the sequences set out as SEQ ID NOS: 1-62 and 125-162. Open reading frames may be identified using techniques that are well known in the art. These techniques include, for example, analysis for the location of known start and stop codons, most likely reading frame identification based on codon frequencies, etc. These techniques include, for example, analysis for the location of known start and stop codons, most likely reading frame identification based on codon frequencies, etc. Suitable tools and software for ORF analysis are well known in the art and include, for example, GeneWise, available from The Sanger Center, Wellcome Trust Genome Campus, Hinxton, Cambridge, CB10 1SA, United Kingdom; Diogenes, available from Computational Biology Centers, University of Minnesota, Academic Health Center, UMHG Box 43 Minneapolis Minn. 55455; and GRAIL, available from the Informatics Group, Oak Ridge National Laboratories, Oak Ridge, Tenn. TN. Once a partial open reading frame is identified, the polynucleotide may be extended in the area of the partial open reading frame using techniques that are well known in the art until the polynucleotide for the full open reading frame is identified.

[0059] Once open reading frames are identified in the polynucleotides of the present invention, the open reading frames may be isolated and/or synthesized. Expressible genetic constructs comprising the open reading frames and suitable promoters, initiators, terminators, etc., which are well known in the art, may then be constructed. Such genetic constructs may be introduced into a host cell to express the polypeptide encoded by the open reading frame. Suitable host cells may include various prokaryotic and eukaryotic cells, including plant cells, mammalian cells, bacterial cells, algae and the like.

[0060] The polynucleotides of the present invention may be isolated by high throughput sequencing of cDNA libraries prepared from forage grass tissue, as described below in Example 1. Alternatively, oligonucleotide probes and primers based on the sequences provided in SEQ ID NOS: 1-62 and 125-162 can be synthesized as detailed below, and used to identify positive clones in either cDNA or genomic DNA libraries from forage grass tissue cells by means of hybridization or polymerase chain reaction (PCR) techniques. Hybridization and PCR techniques suitable for use with such oligonucleotide probes are well known in the art (see, for example, Mullis et al., Cold Spring Harbor Symp. Quant. Biol., 51:263, 1987; Erlich, ed., PCR technology, Stockton Press: NY, 1989; and Sambrook et al., eds., Molecular cloning: a laboratory manual, 2nd ed., CSHL Press: Cold Spring Harbor, N.Y., 1989). In addition to DNA-DNA hybridization, DNA-RNA or RNA-RNA hybridization assays are also possible. In the first case, the mRNA from expressed genes would then be detected instead of genomic DNA or cDNA derived from mRNA of the sample. In the second case, RNA probes could be used. Artificial analogs of DNA hybridizing specifically to target sequences could also be employed. Positive clones may be analyzed by restriction enzyme digestion, DNA sequencing or the like.

[0061] The polynucleotides of the present invention may also, or alternatively, be synthesized using techniques that are well known in the art. The polynucleotides may be synthesized, for example, using automated oligonucleotide synthesizers (e.g., Beckman Oligo 1000M DNA Synthesizer; Beckman Coulter Ltd., Fullerton, Calif.) to obtain polynucleotide segments of up to 50 or more nucleic acids. A plurality of such polynucleotide segments may then be ligated using standard DNA manipulation techniques that are well known in the art of molecular biology. One conventional and exemplary polynucleotide synthesis technique involves synthesis of a single stranded polynucleotide segment having, for example, 80 nucleic acids, and hybridizing that segment to a synthesized complementary 85 nucleic acid segment to produce a 5 nucleotide overhang. The next segment may then be synthesized in a similar fashion, with a 5 nucleotide overhang on the opposite strand. The “sticky” ends ensure proper ligation when the two portions are hybridized. In this way, a complete polynucleotide of the present invention may be synthesized entirely in vitro.

[0062] Oligonucleotide probes and primers complementary to and/or corresponding to SEQ ID NOS: 1-62 and 125-162, and variants of those sequences, are also comprehended by the present invention. Such oligonucleotide probes and primers are substantially complementary to the polynucleotide of interest over a certain portion of the polynucleotide. An oligonucleotide probe or primer is described as “corresponding to” a polynucleotide of the present invention, including one of the sequences set out as SEQ ID NOS: 1-62 and 125-162 or a variant thereof, if the oligonucleotide probe or primer, or its complement, is contained within one of the sequences set out as SEQ ID NOS: 1-62 and 125-162 or a variant of one of the specified sequences.

[0063] Two single stranded sequences are said to be substantially complementary when the nucleotides of one strand, optimally aligned and compared, with the appropriate nucleotide insertions and/or deletions, pair with at least 80%, preferably at least 90% to 95%, and more preferably at least 98% to 100%, of the nucleotides of the other strand. Alternatively, substantial complementarity exists when a first DNA strand will selectively hybridize to a second DNA strand under stringent hybridization conditions.

[0064] In specific embodiments, the oligonucleotide probes and/or primers comprise at least about 6 contiguous residues, more preferably at least about 10 contiguous residues, and most preferably at least about 20 contiguous residues complementary to a polynucleotide sequence of the present invention. Probes and primers of the present invention may be from about 8 to 100 base pairs in length, preferably from about 10 to 50 base pairs in length, and more preferably from about 15 to 40 base pairs in length. The probes can be easily selected using procedures well known in the art, taking into account DNA-DNA hybridization stringencies, annealing and melting temperatures, potential for formation of loops, and other factors which are well known in the art. Preferred techniques for designing PCR primers are disclosed in Dieffenbach and Dyksler, PCR Primer: a laboratory manual, CSHL Press: Cold Spring Harbor, N.Y., 1995. A software program suitable for designing probes, and especially for designing PCR primers, is available from Premier Biosoft International, 3786 Corina Way, Palo Alto, Calif. 94303-4504.

[0065] The isolated polynucleotides of the present invention also have utility in genome mapping, in physical mapping, and in positional cloning of genes.

[0066] The polynucleotides identified as SEQ ID NOS: 1-62 and 125-162 were isolated from cDNA clones and represent sequences that are expressed in the tissue from which the cDNA was prepared. RNA sequences, reverse sequences, complementary sequences, anti-sense sequences, and the like, corresponding to the polynucleotides of the present invention, may be routinely ascertained and obtained using the cDNA sequences identified as SEQ ID NOS: 1-62 and 125-162.

[0067] Identification of genomic DNA and heterologous species DNA can be accomplished by standard DNA/DNA hybridization techniques, under appropriately stringent conditions, using all or part of a polynucleotide sequence as a probe to screen an appropriate library. Alternatively, PCR techniques using oligonucleotide primers that are designed based on known genomic DNA, cDNA and protein sequences can be used to amplify and identify genomic and cDNA sequences.

[0068] In another aspect, the present invention provides isolated polypeptides encoded by the above polynucleotides. As used herein, the term “polypeptide” encompasses amino acid chains of any length, including full-length proteins, wherein the amino acid residues are linked by covalent peptide bonds. The term “polypeptide encoded by a polynucleotide” as used herein, includes polypeptides encoded by a polynucleotide that comprises a partial isolated polynucleotide sequence provided herein. In specific embodiments, the inventive polypeptides comprise an amino acid sequence selected from the group consisting of SEQ ID NO: 63-124 and 163-190, as well as variants of such sequences.

[0069] As noted above, polypeptides of the present invention may be produced recombinantly by inserting a polynucleotide sequence of the present invention encoding the polypeptide into an expression vector and expressing the polypeptide in an appropriate host. Any of a variety of expression vectors known to those of ordinary skill in the art may be employed. Expression may be achieved in any appropriate host cell that has been transformed or transfected with an expression vector containing a polynucleotide molecule that encodes a recombinant polypeptide. Suitable host cells include prokaryotes, yeast, and higher eukaryotic cells. Preferably, the host cells employed are plant, E. coli, insect, yeast, or a mammalian cell line such as COS or293T. The polynucleotide sequences expressed in this manner may encode naturally occurring polypeptides, portions of naturally occurring polypeptides, or other variants thereof. The expressed polypeptides may be used in various assays known in the art to determine their biological activity. Such polypeptides may also be used to raise antibodies, to isolate corresponding interacting proteins or other compounds, and to quantitatively determine levels of interacting proteins or other compounds.

[0070] In a related aspect, polypeptides are provided that comprise at least a functional portion of a polypeptide having an amino acid sequence selected from the group consisting of sequences provided in SEQ ID NO: 63-124 and 163-190, and variants thereof. As used herein, the “functional portion” of a polypeptide is that portion which contains an active site essential for affecting the function of the polypeptide, for example, a portion of the molecule that is capable of binding one or more reactants. The active site may be made up of separate portions present on one or more polypeptide chains and will generally exhibit high binding affinity. Functional portions of a polypeptide may be identified by first preparing fragments of the polypeptide by either chemical or enzymatic digestion of the polypeptide, or by mutation analysis of the polynucleotide that encodes the polypeptide and subsequent expression of the resulting mutant polypeptides. The polypeptide fragments or mutant polypeptides are then tested to determine which portions retain biological activity, using methods well known to those of skill in the art, including the representative assays described below.

[0071] Portions and other variants of the inventive polypeptides may be generated by synthetic or recombinant means. Synthetic polypeptides having fewer than about 100 amino acids, and generally fewer than about 50 amino acids, may be generated using techniques well known to those of ordinary skill in the art. For example, such polypeptides may be synthesized using any of the commercially available solid-phase techniques, such as the Merrifield solid-phase synthesis method, where amino acids are sequentially added to a growing amino acid chain. See Merrifield, J. Am. Chem. Soc. 85:2149-2146, 1963. Equipment for automated synthesis of polypeptides is commercially available from suppliers such as Perkin Elmer/Applied Biosystems, Inc. (Foster City, Calif.), and may be operated according to the manufacturer's instructions. Variants of a native polypeptide may be prepared using standard mutagenesis techniques, such as oligonucleotide-directed site-specific mutagenesis (Kunkel, Proc. Natl. Acad. Sci. USA 82:488-492, 1985). Sections of DNA sequences may also be removed using standard techniques to permit preparation of truncated polypeptides.

[0072] As used herein, the term “variant” comprehends nucleotide or amino acid sequences different from the specifically identified sequences, wherein one or more nucleotides or amino acid residues is deleted, substituted, or added. Variants may be naturally occurring allelic variants, or non-naturally occurring variants. Variant sequences (polynucleotide or polypeptide) preferably exhibit at least 75%, more preferably at least 80%, more preferably at least 90%, more preferably yet at least 95% and most preferably, at least 98% identity to a sequence of the present invention. The percentage identity is determined by aligning the two sequences to be compared as described below, determining the number of identical residues in the aligned portion, dividing that number by the total number of residues in the inventive (queried) sequence, and multiplying the result by 100.

[0073] Polynucleotides and polypeptides having a specified percentage identity to a polynucleotide or polypeptide identified in one of SEQ ID NO: 1-190 thus share a high degree of similarity in their primary structure. In addition to a specified percentage identity to a polynucleotide or polypeptide of the present invention, variant polynucleotides and polypeptides preferably have additional structural and/or functional features in common with a polynucleotide of the present invention. Polynucleotides having a specified degree of identity to, or capable of hybridizing to, a polynucleotide of the present invention preferably additionally have at least one of the following features: (1) they contain an open reading frame, or partial open reading frame, encoding a polypeptide, or a functional portion of a polypeptide, having substantially the same functional properties as the polypeptide, or functional portion thereof, encoded by a polynucleotide in the recited SEQ ID NO:; or (2) they contain identifiable domains in common. Similarly, polypeptides having a specified degree of identity to a polypeptide of the present invention preferably additionally have at least one of the following features: (1) they have substantially the same functional properties as the polypeptide in the recited SEQ ID NO:; or (2) they contain identifiable domains in common.

[0074] Polynucleotide or polypeptide sequences may be aligned, and percentages of identical nucleotides or amino acids in a specified region may be determined against another polynucleotide or polypeptide, using computer algorithms that are publicly available. The BLASTN and FASTA algorithms, set to the default parameters described in the documentation and distributed with the algorithm, may be used for aligning and identifying the similarity of polynucleotide sequences. The alignment and similarity of polypeptide sequences may be examined using the BLASTP algorithm. BLASTX and FASTX algorithms compare nucleotide query sequences translated in all reading frames against polypeptide sequences. The FASTA and FASTX algorithms are described in Pearson and Lipman, Proc. Natl. Acad. Sci. USA 85:2444-2448, 1988; and in Pearson, Methods in Enzymol. 183:63-98, 1990. The FASTA software package is available from the University of Virginia by contacting the Assistant Provost for Research, University of Virginia, PO Box 9025, Charlottesville, Va. 22906-9025. The BLASTN software is available from the National Center for Biotechnology Information (NCBI), National Library of Medicine, Building 38A, Room 8N805, Bethesda, Md. 20894. The BLASTN algorithm Version 2.0.11 [Jan.-20-2000] and Version 2.2.1 [Apr.-13-2001] set to the default parameters described in the documentation and distributed with the algorithm, are preferred for use in the determination of polynucleotide variants according to the present invention. The use of the BLAST family of algorithms, including BLASTN, BLASTP and BLASTX, is described in the publication of Altschul et al., “Gapped BLAST and PSI-BLAST: a new generation of protein database search programs,” Nucleic Acids Res. 25:3389-3402, 1997.

[0075] The following running parameters are preferred for determination of alignments and similarities using BLASTN that contribute to the E values and percentage identity for polynucleotides: Unix running command with the following default parameters: blastall -p blastn -d embldb -e 10 -G 0 -E 0 -r 1 -v 30 -b 30 -i queryseq -o results; and parameters are: -p Program Name [String]; -d Database [String]; -e Expectation value (E) [Real]; -G Cost to open a gap (zero invokes default behavior) [Integer]; -E Cost to extend a gap (zero invokes default behavior) [Integer]; -r Reward for a nucleotide match (BLASTN only) [Integer]; -v Number of one-line descriptions (V) [Integer]; -b Number of alignments to show (B) [Integer]; -i Query File [File In]; -o BLAST report Output File [File Out] Optional.

[0076] The following running parameters are preferred for determination of alignments and similarities using BLASTP that contribute to the E values and percentage identity of polypeptide sequences: blastall -p blastp -d swissprotdb -e 10 -G 0 -E 0 -v 30 -b 30 -i queryseq -o results; the parameters are: -p Program Name [String]; -d Database [String]; -e Expectation value (E) [Real]; -G Cost to open a gap (zero invokes default behavior) [Integer]; -E Cost to extend a gap (zero invokes default behavior) [Integer]; -v Number of one-line descriptions (v) [Integer]; -b Number of alignments to show (b) [Integer]; -I Query File [File In]; -o BLAST report Output File [File Out] Optional.

[0077] The “hits” to one or more database sequences by a queried sequence produced by BLASTN, BLASTP, FASTA, or a similar algorithm, align and identify similar portions of sequences. The hits are arranged in order of the degree of similarity and the length of sequence overlap. Hits to a database sequence generally represent an overlap over only a fraction of the sequence length of the queried sequence.

[0078] As noted above, the percentage identity of a polynucleotide or polypeptide sequence is determined by aligning polynucleotide and polypeptide sequences using appropriate algorithms, such as BLASTN or BLASTP, respectively, set to default parameters; identifying the number of identical nucleic or amino acids over the aligned portions; dividing the number of identical nucleic or amino acids by the total number of nucleic or amino acids of the polynucleotide or polypeptide of the present invention; and then multiplying by 100 to determine the percentage identity. By way of example, a queried polynucleotide having 220 nucleic acids has a hit to a polynucleotide sequence in the EMBL database having 520 nucleic acids over a stretch of 23 nucleotides in the alignment produced by the BLASTN algorithm using the default parameters. The 23-nucleotide hit includes 21 identical nucleotides, one gap and one different nucleotide. The percentage identity of the queried polynucleotide to the hit in the EMBL database is thus 21/220 times 100, or 9.5%. The percentage identity of polypeptide sequences may be determined in a similar fashion.

[0079] The BLASTN and BLASTX algorithms also produce “Expect” values for polynucleotide and polypeptide alignments. The Expect value (E) indicates the number of hits one can “expect” to see over a certain number of contiguous sequences by chance when searching a database of a certain size. The Expect value is used as a significance threshold for determining whether the hit to a database indicates true similarity. For example, an E value of 0.1 assigned to a polynucleotide hit is interpreted as meaning that in a database of the size of the EMBL database, one might expect to see 0.1 matches over the aligned portion of the sequence with a similar score simply by chance. By this criterion, the aligned and matched portions of the sequences then have a probability of 90% of being related. For sequences having an E value of 0.01 or less over aligned and matched portions, the probability of finding a match by chance in the EMBL database is 1% or less using the BLASTN algorithm. E values for polypeptide sequences may be determined in a similar fashion using various polypeptide databases, such as the SwissProt database.

[0080] According to one embodiment, “variant” polynucleotides and polypeptides, with reference to each of the polynucleotides and polypeptides of the present invention, preferably comprise sequences having the same number or fewer nucleotides or amino acids than each of the polynucleotides or polypeptides of the present invention and producing an E value of 0.01 or less when compared to the polynucleotide or polypeptide of the present invention. That is, a variant polynucleotide or polypeptide is any sequence that has at least a 99% probability of being related to the polynucleotide or polypeptide of the present invention, measured as having an E value of 0.01 or less using the BLASTN or BLASTX algorithms set at the default parameters. According to a preferred embodiment, a variant polynucleotide is a sequence having the same number or fewer nucleic acids than a polynucleotide of the present invention that has at least a 99% probability of being related to the polynucleotide of the present invention, measured as having an E value of 0.01 or less using the BLASTN algorithm set at the default parameters. Similarly, according to a preferred embodiment, a variant polypeptide is a sequence having the same number or fewer amino acids than a polypeptide of the present invention that has at least a 99% probability of being related as the polypeptide of the present invention, measured as having an E value of 0.01 or less using the BLASTP algorithm set at the default parameters.

[0081] In an alternative embodiment, variant polynucleotides are sequences that hybridize to a polynucleotide of the present invention under stringent conditions. Stringent hybridization conditions for determining complementarity include salt conditions of less than about 1 M, more usually less than about 500 mM, and preferably less than about 200 mM. Hybridization temperatures can be as low as 5° C., but are generally greater than about 22° C., more preferably greater than about 30° C., and most preferably greater than about 37° C. Longer DNA fragments may require higher hybridization temperatures for specific hybridization. Since the stringency of hybridization may be affected by other factors such as probe composition, presence of organic solvents, and extent of base mismatching, the combination of parameters is more important than the absolute measure of any one alone. An example of “stringent conditions” is prewashing in a solution of 6×SSC, 0.2% SDS; hybridizing at 65° C., 6×SSC, 0.2% SDS overnight; followed by two washes of 30 minutes each in 1×SSC, 0.1% SDS at 65° C. and two washes of 30 minutes each in 0.2×SSC, 0.1% SDS at 65° C.

[0082] The present invention also encompasses polynucleotides that differ from the disclosed sequences but that, as a consequence of the discrepancy of the genetic code, encode a polypeptide having similar enzymatic activity to a polypeptide encoded by a polynucleotide of the present invention. Thus, polynucleotides comprising sequences that differ from the polynucleotide sequences recited in SEQ ID NO: 1-62 and 125-162, or complements, reverse sequences, or reverse complements of those sequences, as a result of conservative substitutions are contemplated by and encompassed within the present invention. Additionally, polynucleotides comprising sequences that differ from the polynucleotide sequences recited in SEQ ID NO: 1-62 and 125-162, or complements, reverse complements or reverse sequences thereof, as a result of deletions and/or insertions totaling less than 10% of the total sequence length are also contemplated by and encompassed within the present invention. Similarly, polypeptides comprising sequences that differ from the polypeptide sequences recited in SEQ ID NO: 63-124 and 163-190 as a result of amino acid substitutions, insertions, and/or deletions totaling less than 10% of the total sequence length are contemplated by and encompassed within the present invention, provided the variant polypeptide has activity in a lignin, fructan or tannin biosynthetic pathway.

[0083] In another aspect, the present invention provides genetic constructs comprising, in the 5′-3′ direction, a gene promoter sequence; an open reading frame coding for at least a functional portion of a polypeptide of the present invention; and a gene termination sequence. The open reading frame may be orientated in either a sense or anti-sense direction. For applications where amplification of lignin, fructan or tannin synthesis is desired, the open reading frame may be inserted in the construct in a sense orientation, such that transformation of a target organism with the construct will lead to an increase in the number of copies of the gene and therefore an increase in the amount of enzyme. When down-regulation of lignin, fructan or tannin synthesis is desired, the open reading frame may be inserted in the construct in an anti-sense orientation, such that the RNA produced by transcription of the polynucleotide is complementary to the endogenous mRNA sequence. This, in turn, will result in a decrease in the number of copies of the gene and therefore a decrease in the amount of enzyme. Alternatively, regulation may be achieved by inserting appropriate sequences or subsequences (e.g., DNA or RNA) in ribozyme constructs.

[0084] Genetic constructs comprising a non-coding region of a gene coding for a polypeptide of the present invention, or a nucleotide sequence complementary to a non-coding region, together with a gene promoter sequence and a gene termination sequence, are also provided. As used herein the term “non-coding region” includes both transcribed sequences which are not translated, and non-transcribed sequences within about 2000 base pairs 5′ or 3′ of the translated sequences or open reading frames. Examples of non-coding regions which may be usefully employed in the inventive constructs include introns and 5′-non-coding leader sequences. Transformation of a target plant with such a genetic construct may lead to a reduction in the amount of lignin, fructan or tannin synthesized by the plant by the process of cosuppression, in a manner similar to that discussed, for example, by Napoli et al., Plant Cell 2:279-290, 1990; and de Carvalho Niebel et al., Plant Cell 7:347-358, 1995.

[0085] The genetic constructs of the present invention further comprise a gene promoter sequence and a gene termination sequence, operably linked to the polynucleotide to be transcribed, which control expression of the gene. The gene promoter sequence is generally positioned at the 5′ end of the polynucleotide to be transcribed, and is employed to initiate transcription of the polynucleotide. Gene promoter sequences are generally found in the 5′ non-coding region of a gene but they may exist in introns (Luehrsen, Mol. Gen. Genet. 225:81-93, 1991). When the construct includes an open reading frame in a sense orientation, the gene promoter sequence also initiates translation of the open reading frame. For genetic constructs comprising either an open reading frame in an anti-sense orientation or a non-coding region, the gene promoter sequence consists only of a transcription initiation site having a RNA polymerase binding site.

[0086] A variety of gene promoter sequences which may be usefully employed in the genetic constructs of the present invention are well known in the art. The promoter gene sequence, and also the gene termination sequence, may be endogenous to the target plant host or may be exogenous, provided the promoter is functional in the target host. For example, the promoter and termination sequences may be from other plant species, plant viruses, bacterial plasmids and the like. Preferably, gene promoter and termination sequences are from the inventive sequences themselves.

[0087] Factors influencing the choice of promoter include the desired tissue specificity of the construct, and the timing of transcription and translation. For example, constitutive promoters, such as the 35S Cauliflower Mosaic Virus (CaMV 35S) promoter, will affect the activity of the enzyme in all parts of the plant. Use of a tissue specific promoter will result in production of the desired sense or anti-sense RNA only in the tissue of interest. With DNA constructs employing inducible gene promoter sequences, the rate of RNA polymerase binding and initiation can be modulated by external stimuli, such as light, heat, anaerobic stress, alteration in nutrient conditions and the like. Temporally regulated promoters can be employed to effect modulation of the rate of RNA polymerase binding and initiation at a specific time during development of a transformed cell. Preferably, the original promoters from the enzyme gene in question, or promoters from a specific tissue-targeted gene in the organism to be transformed, such as Lolium or Festuca, are used. Grass promoters different from the original gene may also be usefully employed in the inventive genetic constructs in order to prevent feedback inhibition. For example, the fructosyltransferase gene will be regulated by sucrose sensing systems; therefore removing the gene from under control of its normal promoter allows the gene to be active all the time. Other examples of gene promoters which may be usefully employed in the present invention include, mannopine synthase (mas), octopine synthase (ocs) and those reviewed by Chua et al., Science 244:174-181, 1989.

[0088] The gene termination sequence, which is located 3′ to the polynucleotide to be transcribed, may come from the same gene as the gene promoter sequence or may be from a different gene. Many gene termination sequences known in the art may be usefully employed in the present invention, such as the 3′ end of the Agrobacterium tumefaciens nopaline synthase gene. However, preferred gene terminator sequences are those from the original enzyme gene or from the target species to be transformed.

[0089] The genetic constructs of the present invention may also contain a selection marker that is effective in plant cells, to allow for the detection of transformed cells containing the inventive construct. Such markers, which are well known in the art, typically confer resistance to one or more toxins. One example of such a marker is the NPTII gene whose expression results in resistance to kanamycin or hygromycin, antibiotics which are usually toxic to plant cells at a moderate concentration (Rogers et al., in Weissbach A and H, eds., Methods for Plant Molecular Biology, Academic Press Inc.: San Diego, Calif., 1988). Alternatively, the presence of the desired construct in transformed cells can be determined by means of other techniques well known in the art, such as Southern and Western blots.

[0090] Techniques for operatively linking the components of the inventive genetic constructs are well known in the art and include the use of synthetic linkers containing one or more restriction endonuclease sites as described, for example, by Sambrook et al., (Molecular cloning: a laboratory manual, CSHL Press: Cold Spring Harbor, N.Y., 1989). The genetic construct of the present invention may be linked to a vector having at least one replication system, for example, E. coli, whereby after each manipulation, the resulting construct can be cloned and sequenced and the correctness of the manipulation determined.

[0091] The genetic constructs of the present invention may be used to transform a variety of plants, both monocotyledonous (e.g., grasses, maize/corn, grains, oats, rice, sorghum, millet, rye, sugar cane, wheat and barley), dicotyledonous (e.g., Arabidopsis, tobacco, legumes, alfalfa, oaks, eucalyptus, maple), and gymnosperms. In a preferred embodiment, the inventive genetic constructs are employed to transform grasses. Preferably the target plant is selected from the group consisting of Lolium and Festuca species, most preferably from the group consisting of Lolium perenne and Festuca arundinacea. Other plants that may be usefully transformed with the inventive genetic constructs include other species of ryegrass and fescue, including, but not limited to Lolium multiflorum (Italian ryegrass), Lolium hybridum (hybrid ryegrass), Lolium rigidum (Wimerra grass), Lolium temulentum (darnel), Festuca rubra (red fescue) and Festuca pratensis (meadow fescue). As discussed above, transformation of a plant with a genetic construct of the present invention will produce a modified lignin, fructan or tannin content in the plant.

[0092] The production of RNA in target cells may be controlled by choice of the promoter sequence, or by selecting the number of functional copies or the site of integration of the polynucleotides incorporated into the genome of the target organism. A target plant may be transformed with more than one construct of the present invention, thereby modulating the lignin, fructan and/or tannin biosynthetic pathways by affecting the activity of more than one enzyme, affecting enzyme activity in more than one tissue or affecting enzyme activity at more than one expression time. Similarly, a construct may be assembled containing more than one open reading frame coding for an enzyme encoded by a polynucleotide of the present invention or more than one non-coding region of a gene coding for such an enzyme. The polynucleotides of the present invention may also be employed in combination with other known sequences encoding enzymes involved in the lignin, fructan and/or tannin biosynthetic pathways. In this manner, more than one biosynthetic pathway may be modulated, or a lignin, fructan or tannin biosynthetic pathway may be added to a plant to produce a plant having an altered phenotype.

[0093] Techniques for stably incorporating genetic constructs into the genome of target plants are well known in the art and include Agrobacterium tumefaciens mediated introduction, electroporation, protoplast fusion, injection into reproductive organs, injection into immature embryos, high velocity projectile introduction and the like. The choice of technique will depend upon the target plant to be transformed. For example, dicotyledonous plants and certain monocots and gymnosperms may be transformed by Agrobacterium Ti plasmid technology, as described, for example by Bevan, Nucleic Acid Res. 12:8711-8721, 1984. Targets for the introduction of the genetic constructs of the present invention include tissues, such as leaf tissue, disseminated cells, protoplasts, seeds, embryos, meristematic regions; cotyledons, hypocotyls, and the like. Transformation techniques which may be usefully employed in the inventive methods include those taught by Ellis et al., Plant Cell Reports, 8:16-20, 1989; Wilson et al., Plant Cell Reports 7:704-707, 1989; Tautorus et al., Theor. Appl. Genet. 78:531-536, 198; Hiei et al., Plant J. 6:271-282, 1994; and Ishida et al., Nature Biotechnol. 14:745-750, 1996; U.S. Pat. No. 5,591,616; and European Patent Publication EP 672 752 A1. Once the cells are transformed, cells having the inventive DNA construct incorporated in their genome may be selected by means of a marker, such as the kanamycin resistance marker discussed above. Transgenic cells may then be cultured in an appropriate medium to regenerate whole plants, using techniques well known in the art. In the case of protoplasts, the cell wall is allowed to reform under appropriate osmotic conditions. In the case of seeds or embryos, an appropriate germination or callus initiation medium is employed. For explants, an appropriate regeneration medium is used. Regeneration of plants is well established for many species. The resulting transformed plants may be reproduced sexually or asexually, using methods well known in the art, to give successive generations of transgenic plants.

[0094] Polynucleotides of the present invention may also be used to specifically suppress gene expression by methods that operate post-transcriptionally to block the synthesis of products of targeted genes, such as RNA interference (RNAi), and quelling. For a review of techniques of gene suppression see Science, 288:1370-1372, 2000. Exemplary gene silencing methods are also provided in WO 99/49029 and WO 99/53050. Posttranscriptional gene silencing is brought about by a sequence-specific RNA degradation process which results in the rapid degradation of transcripts of sequence-related genes. Studies have provided evidence that double-stranded RNA may act as a mediator of sequence-specific gene silencing (see, e.g., review by Montgomery and Fire, Trends in Genetics, 14: 255-258, 1998). Gene constructs that produce transcripts with self-complementary regions are particularly efficient at gene silencing. A unique feature of this posttranscriptional gene silencing pathway is that silencing is not limited to the cells where it is initiated. The gene-silencing effects may be disseminated to other parts of an organism and even transmitted through the germ line to several generations.

[0095] The polynucleotides of the present invention may be employed to generate gene silencing constructs and or gene-specific self-complementary RNA sequences that can be delivered by conventional art-known methods to plant tissues, such as forage grass tissues. Within genetic constructs, sense and antisense sequences can be placed in regions flanking an intron sequence in proper splicing orientation with donor and acceptor splicing sites, such that intron sequences are removed during processing of the transcript and sense and antisense sequences, as well as splice junction sequences, bind together to form double-stranded RNA. Alternatively, spacer sequences of various lengths may be employed to separate self-complementary regions of sequence in the construct. During processing of the gene construct transcript, intron sequences are spliced-out, allowing sense and anti-sense sequences, as well as splice junction sequences, to bind forming double-stranded RNA. Select ribonucleases bind to and cleave the double-stranded RNA, thereby initiating the cascade of events leading to degradation of specific mRNA gene sequences, and silencing specific genes. Alternatively, rather than using a gene construct to express the self-complementary RNA sequences, the gene-specific double-stranded RNA segments are delivered to one or more targeted areas to be internalized into the cell cytoplasm to exert a gene silencing effect. Gene silencing RNA sequences comprising the polynucleotides of the present invention are useful for creating genetically modified plants with desired phenotypes as well as for characterizing genes (e.g., in high-throughput screening of sequences), and studying their functions in intact organisms.

### EXAMPLE 1

### Isolation of cDNA Sequences from L. perenne and F. arundinacea cDNA Libraries

[0096] L. perenne and F. arundinacea cDNA expression libraries were constructed and screened as follows. Tissue was collected from L. perenne and F. arundinacea during winter and spring, and snap-frozen in liquid nitrogen. The tissues collected include those obtained from leaf blades, leaf base, pseudostem, floral stems, inflorescences, roots and stem. Total RNA was isolated from each tissue type using TRIzol Reagent (BRL Life Technologies, Gaithersburg, Md.). mRNA from each tissue type was obtained using a Poly(A) Quik mRNA isolation kit (Stratagene, La Jolla, Calif.), according to the manufacturer's specifications. cDNA expression libraries were constructed from the purified mRNA by reverse transcriptase synthesis followed by insertion of the resulting cDNA in Lambda ZAP using a ZAP Express cDNA Synthesis Kit (Stratagene, La Jolla, Calif.), according to the manufacturer's protocol. The resulting cDNA clones were packaged using a Gigapack II Packaging Extract (Stratagene, La Jolla, Calif.) employing 1 μl of sample DNA from the 5 μl ligation mix. Mass excision of the libraries was done using XL1-Blue MRF′ cells and XLOLR cells (Stratagene, La Jolla, Calif.) with ExAssist helper phage (Stratagene, La Jolla, Calif.). The excized phagemids were diluted with NZY broth (Gibco BRL, Gaithersburg, Md.) and plated out onto LB-kanamycin agar plates containing 5-bromo-4-chloro-3-indolyl-beta-D-galactosidase (X-gal) and isopropylthio-beta-galactoside (IPTG). Of the colonies plated and picked for DNA preparations, the large majority contained an insert suitable for sequencing. Positive colonies were cultured in NZY broth with kanamycin and DNA was purified following standard protocols. Agarose gel at 1% was used to screen sequencing templates for chromosomal contamination. Dye terminator sequences were prepared using a Biomek 2000 robot (Beckman Coulter Inc., Fullerton, Calif.) for liquid handling and DNA amplification using a 9700 PCR machine (Perkin Elmer/Applied Biosystems, Foster City, Calif.) according to the manufacturer's protocol.

[0097] The DNA sequences for positive clones were obtained using a Perkin Elmer/Applied Biosystems Division Prism 377 sequencer. cDNA clones were sequenced from the 5′ end. The polynucleotide sequences identified as SEQ ID NO: 4, 6, 11, 127, 128 and 132 were identified from L. perenne leaf cDNA expression libraries; the polynucleotide sequences identified as SEQ ID NO: 1, 14, 15, 26, 32, 36, 38, 41, 49, 125, 134, 141, 144, 147, and 150 were identified from L. perenne vegetative stem cDNA expression libraries; the polynucleotide sequences identified as SEQ ID NO: 17, 22, 25, 138, and 140 were identified from L. perenne leaf and pseudostem cDNA expression libraries; the polynucleotide sequences identified as SEQ ID NO: 43, 57, 61, 157, and 161 were identified from L. perenne pseudostem cDNA expression libraries; the polynucleotide sequences identified as SEQ ID NO: 10, 12, 28, 30, 34, 44, 60, 131, 133, 142, 143, 145, 151, and 160 were identified from L. perenne floral stem cDNA expression libraries; the polynucleotide sequences identified as SEQ ID NO: 8, 18, 46, 52, 53, 55, 59, 136, 152, 155, 156, 159, and 162 were identified from L. perenne stem cDNA expression libraries; the polynucleotide sequences identified as SEQ ID NO: 51 and 154 were identified from a L. perenne root cDNA expression library; the polynucleotide sequences identified as SEQ ID NO: 24, 27 and 139 were identified from L. perenne leaf blade cDNA expression libraries; the polynucleotide sequences identified as SEQ ID NO: 9, 37, 39, 40, 45, 130, 148, and 149 were identified from F. arundinacea basal leaf cDNA expression libraries; the polynucleotide sequences identified as SEQ ID NO: 19, 21, 29, 33, 35, 47, 48, and 153 were identified from F. arundinacea combined day 3 and day 6 basal leaves cDNA expression libraries; the polynucleotide sequence identified as SEQ ID NO: 54 was identified from a F. arundinacea combined day 3 and day 6 leaves cDNA expression library; the polynucleotide sequence identified as SEQ ID NO: 56 was identified from a F. arundinacea inflorescence cDNA expression library; the polynucleotide sequences identified as SEQ ID NO: 20 and 137 were identified from a subtracted F. arundinacea leaf blade cDNA expression library; the polynucleotide sequences identified as SEQ ID NO: 7, 23, 42, 50, 62, and 129 were identified from F. arundinacea pseudostem cDNA expression libraries; the polynucleotide sequences identified as SEQ ID NO: 2, 13, 16 and 135 were identified from F. arundinacea leaf cDNA expression libraries; and the polynucleotide sequences identified as SEQ ID NO: 3, 5, 31, and 126 were identified from a F. arundinacea inflorescence day 0 cDNA expression library.

BLASTN Polynucleotide Analysis

[0098] The isolated cDNA sequences were compared to sequences in the EMBL DNA database using the computer algorithm BLASTN. Comparisons of DNA sequences provided in SEQ ID NOS: 1-62 to sequences in the EMBL DNA database were made as of Oct. 19, 2001 using BLASTN algorithm Version 2.0.11 [Jan.-20-2000], and the following Unix running command: blastall -p blastn -d embldb -e 10 -G0 -E0 -r 1 -v 30 -b 30 -i queryseq -o. Comparisons of DNA sequences provided in SEQ ID NOS: 125-162 to sequences in the EMBL DNA database were made using BLASTN algorithm Version 2.2.1 [Apr.-13-2001], and the following Unix running command: blastall -p blastn -d embldb -F F -e 10 -G0 -E0 -r 1 -v 2 -b 2-i queryseq -o.

[0099] The sequences of SEQ ID NO: 4-6, 9-11, 17-19, 21-26, 33, 44, 45, 48, 49, 51-55, 59, 60, 130-132, 136, 139, 146, 151, 154-156, 159, and 162 were determined to have less than 50% identity to sequences in the EMBL database using the computer algorithm BLASTN, as described above. The sequences of SEQ ID NO: 2, 3, 7, 8, 14, 16, 36-38, 46, 47, 50, 56-58, 61, 129, 135, 137, 138, 152, 153, 157, 158, 160 and 161 were determined to have less than 75% identity to sequences in the EMBL database using the computer algorithm BLASTN, as described above. The sequences of SEQ ID NOS: 1, 12, 13, 15, 20, 28, 31, 32, 35, 40 62, 125-128, 133, 134, 142, 144 and 147 were determined to have less than 90% identity to sequences in the EMBL database using the computer algorithm BLASTN, as described above. Finally, the sequences of SEQ ID NOS: 29, 30, 39, 41-43, 141, 143, 148, and 149 were determined to have less than 98% identity to sequences in the EMBL database using the computer algorithm BLASTN, as described above.

BLASTP Polypeptide Analysis

[0100] The protein sequences corresponding to the isolated cDNA sequences were compared to sequences in the SwissProt/Trembl protein database using the computer algorithm BLASTP. Comparisons of protein sequences provided in SEQ ID NOS: 63-124 to sequences in the SwissProt/Trembl protein database were made as of Oct. 19, 2001 using BLASTP algorithm Version 2.0.11 [Jan.-20-2000], and the following Unix running command: blastall -p blastp -dstdb-e 10 -G0 -E0 -v 30 -b 30 -i queryseq -o. Comparisons of protein sequences provided in SEQ ID NOS: 163-190 to sequences in the SwissProt/Trembl protein database were made using BLASTP algorithm Version 2.2.1 [Apr.-13-2001], and the following Unix running command: blastall -p blastp -d stdb -F F -e 10 -G0 -E0 -v 2 -b 2 -i queryseq -o.

[0101] The sequences of SEQ ID NOS: 65-68, 72, 73, 78, 80, 81, 84, 85, 87, 88, 106, 107, 110,111, 113-115, 117, 118 and 121 were determined to have less than 50% identity to sequences in the SwissProt/Trembl database using the computer algorithm BLASTP, as described above. The sequences of SEQ ID NOS: 71, 79, 82, 83, 86, 95, 98-100, 112, 116, 120, 122-124, 167, 168, 171-174, 185, 188, and 190 were determined to have less than 75% identity to sequences in the SwissProt/Trembl database using the computer algorithm BLASTP, as described above. The sequences of SEQ ID NOS: 63, 64, 69, 70, 74-77, 90, 91, 93, 94, 97, 101, 102, 104, 108, 109, 119, 175, 183, 187, and 189 were determined to have less than 90% identity to sequences in the SwissProt/Trembl database using the computer algorithm BLASTP, as described above. Finally, the sequences of SEQ ID NOS: 89, 92, 96, 103, 105, 163-165, 169, 170, 177, 179, 181, 184, and 186 were determined to have less than 98% identity to sequences in the SwissProt/Trembl database using the computer algorithm BLASTP, as described above.

BLASTX Polynucleotide Analysis

[0102] The isolated cDNA sequences were compared to sequences in the SwissProt/Trembl protein database using the computer algorithm BLASTX. Comparisons of DNA sequences provided in SEQ ID NOS: 1-62 to sequences in the SwissProt/Trembl protein database were made as of Oct. 19, 2001 using BLASTX algorithm Version 2.0.11 [Jan.-20-2000], and the following Unix running command: blastall -p blastx -dstdb -e 10 -G0 -E0 -v 30 -b 30 -i queryseq -o. Comparisons of DNA sequences provided in SEQ ID NOS: 1-62 to sequences in the SwissProt/Trembl protein database were made using BLASTX algorithm Version 2.2.1 [Apr.-13-2001], and the following Unix running command: blastall -p blastx -d stdb -F F -e 10 -G0 -E0 -v 2 -b 2 -i queryseq -o.

[0103] The sequences of SEQ ID NOS: 11, 44, 45, 48, 49, 51, 52, 55, 130, 132, 155, 156, and 162 were determined to have less than 50% identity to sequences in the SwissProt/Trembl database using the computer algorithm BLASTX, as described above. The sequences of SEQ ID NOS: 3-10, 16-26, 33, 36-38, 40-43, 50, 53, 54, 56, 58-62, 129, 131, 135-139, 146, 150, 151, 154, and 158-161 were determined to have less than 75% identityto sequences in the SwissProt/Trembl database using the computer algorithm BLASTX, as described above. The sequences of SEQ ID NOS: 1, 2, 12-15, 27, 28-32, 34, 35, 39, 46, 47, 57, 125-128, 133, 134, 141-145, 147-149, 152, 153, and 157 were determined to have less than 90% identity to sequences in the SwissProt/Trembl database using the computer algorithm BLASTX, as described above. Finally, the sequence of SEQ ID NO: 140 was determined to have less than 98% identity to sequences in the SwissProt/Trembl database using the computer algorithm BLASTX, as described above.

[0104] The location of open reading frames (ORFs), by nucleotide position, contained within the sequences of SEQ ID NO: 1-62 and 125-162, and the corresponding amino acid sequences are provided in Table 2 below. SEQ ID NO: 1-8, 10-15, 17, 19, 21, 23-25, 28-52, 54-59, 61-62 and 125-162 are believed to contain full-length ORFs.

TABLE 2

| POLYNUCLEOTIDE | | POLYPEPTIDE |
|---|---|---|
| SEQ ID NO: | ORF | SEQ ID NO: |
| 1 | 56-2,020 | 63 |
| 2 | 64-2,010 | 64 |
| 3 | 64-1,926 | 65 |
| 4 | 74-1,945 | 66 |
| 5 | 40-1,911 | 67 |
| 6 | 79-1,938 | 68 |
| 7 | 246-1,514 | 69 |
| 8 | 264-1,532 | 70 |
| 9 | 84-3,272 | 71 |
| 10 | 73-3,297 | 72 |
| 11 | 129-2,942 | 73 |
| 12 | 46-2,472 | 74 |
| 13 | 113-2,539 | 75 |
| 14 | 61-2,505 | 76 |
| 15 | 103-2,253 | 77 |
| 16 | 3-1,439 | 78 |
| 17 | 26-1,777 | 79 |
| 18 | 2-1,174 | 80 |
| 19 | 59-1,852 | 81 |
| 20 | 2-1,201 | 82 |
| 21 | 1-1,779 | 83 |
| 22 | 198-1,097 | 84 |
| 23 | 27-1,772 | 85 |
| 24 | 36-1,802 | 86 |
| 25 | 78-2,084 | 87 |
| 26 | 2-1,423 | 88 |
| 27 | 3-1,622 | 89 |
| 28 | 85-1,764 | 90 |
| 29 | 72-1,751 | 91 |
| 30 | 127-1,800 | 92 |
| 31 | 137-1,810 | 93 |
| 32 | 62-1,567 | 94 |
| 33 | 80-1,597 | 95 |
| 34 | 32-1,117 | 96 |
| 35 | 86-1,171 | 97 |
| 36 | 55-852 | 98 |
| 37 | 75-872 | 99 |
| 38 | 149-1,240 | 100 |
| 39 | 90-1,118 | 101 |
| 40 | 28-1,110 | 102 |
| 41 | 66-1,148 | 103 |
| 42 | 64-1,146 | 104 |
| 43 | 85-1,170 | 105 |
| 44 | 88-1,683 | 106 |
| 45 | 93-1,721 | 107 |
| 46 | 111-2,246 | 108 |
| 47 | 144-2,285 | 109 |
| 48 | 22-993 | 110 |
| 49 | 4-1,038 | 111 |
| 50 | 87-1,067 | 112 |
| 51 | 59-1,135 | 113 |
| 52 | 18-1,052 | 114 |
| 53 | 1-882 | 115 |
| 54 | 80-1,015 | 116 |
| 55 | 322-1,014 | 117 |
| 56 | 172-762 | 118 |
| 57 | 118-1,299 | 119 |
| 58 | 5-595 | 120 |
| 59 | 14-1,003 | 121 |
| 60 | 1-987 | 122 |
| 61 | 65-1,174 | 123 |
| 62 | 103-1,245 | 124 |
| 125 | 55-2,019 | 163 |
| 126 | 63-1,925 | 164 |
| 127 | 73-1,944 | 165 |
| 128 | 71-1,930 | 166 |
| 131 | 72-3,299 | 167 |
| 132 | 134-2,950 | 168 |
| 133 | 45-2,471 | 169 |
| 134 | 65-2,512 | 170 |
| 135 | 74-1,819 | 171 |
| 136 | 170-1,855 | 172 |
| 137 | 28-1,770 | 173 |
| 138 | 26-1,733 | 174 |
| 139 | 35-1,801 | 175 |
| 140 | 71-2,083 | 176 |
| 141 | 63-1,607 | 177 |
| 143 | 126-1,799 | 178 |
| 144 | 61-1,566 | 179 |
| 145 | 67-1,152 | 180 |
| 147 | 148-1,239 | 181 |
| 149 | 27-1,109 | 182 |
| 151 | 87-1,718 | 183 |
| 153 | 143-2,284 | 184 |
| 156 | 46-1,017 | 185 |
| 157 | 117-1,313 | 186 |
| 158 | 81-1,193 | 187 |
| 159 | 12-1,001 | 188 |
| 160 | 26-1,018 | 189 |
| 162 | 50-1,027 | 190 |

[0105] SEQ ID NO: 125 and 163 are related to SEQ ID NO: 1 and 63, respectively; SEQ ID NO: 126 and 164 are related to SEQ ID NO: 3 and 65, respectively; SEQ ID NO: 127 and 165 are related to SEQ ID NO: 4 and 66, respectively; SEQ ID NO: 128 and 166 are related to SEQ ID NO: 6 and 68, respectively; SEQ ID NO: 129 is an extended sequence of SEQ ID NO: 7; SEQ ID NO: 130 is an extended sequence of SEQ ID NO: 9; SEQ ID NO: 131 and 167 are related to SEQ ID NO: 10 and 72, respectively; SEQ ID NO: 132 and 168 are related to SEQ ID NO: 11 and 73, respectively; SEQ ID NO: 133 and 169 are related to SEQ ID NO: 12 and 74, respectively; SEQ ID NO: 134 and 170 are related to SEQ ID NO: 14 and 76, respectively; SEQ ID NO: 135 and 171 are full-length sequences of SEQ ID NO: 16 and 78, respectively; SEQ ID NO: 136 and 172 are full-length sequences of SEQ ID NO: 18 and 80, respectively; SEQ ID NO: 137 and 173 are related to SEQ ID NO: 20 and 82, respectively; SEQ ID NO: 138 and 174 are full-length sequences of SEQ ID NO: 22 and 84, respectively; SEQ ID NO: 139 and 175 are related to SEQ ID NO: 24 and 86, respectively; SEQ ID NO: 140 and 176 are related to SEQ ID NO: 25 and 87, respectively; SEQ ID NO: 141 and 177 are full-length sequences of SEQ ID NO: 26 and 88, respectively; SEQ ID NO: 142 is related to SEQ ID NO: 28 and encodes the same amino acid sequence; SEQ ID NO: 143 and 178 are related to SEQ ID NO: 30 and 92, respectively; SEQ ID NO: 144 and 179 are related to SEQ ID NO: 32 and 94, respectively; SEQ ID NO: 145 and 180 are full-length sequences of SEQ ID NO: 34 and 96, respectively; SEQ ID NO: 146 is related to SEQ ID NO: 36 and encodes the same amino acid sequence; SEQ ID NO: 147 and 181 are related to SEQ ID NO: 38 and 100, respectively; SEQ ID NO: 148 is related to SEQ ID NO: 39, and encodes the same amino acid sequence; SEQ ID NO: 149 and 182 are related to SEQ ID NO: 40 and 102, respectively; SEQ ID NO: 150 is related to SEQ ID NO: 41 and encodes the same amino acid sequence; SEQ ID NO: 151 and 183 is related to SEQ ID NO: 44 and 106, respectively; SEQ ID NO: 152 is related to SEQ ID NO: 46, and encodes the same amino acid sequence; SEQ ID NO: 153 and 184 are related to SEQ ID NO: 47 and 109, respectively; SEQ ID NO: 154 is related to SEQ ID NO: 51, and encodes the same amino acid sequence; SEQ ID NO: 155 is related to SEQ ID NO: 52, and encodes the same amino acid sequence; SEQ ID NO: 156 and 185 are full-length sequences of SEQ ID NO: 53 and 115, respectively; SEQ ID NO: 162 and 190 are variants of SEQ ID NO: 156 and 185, respectively, with a difference in the 5′ region of SEQ ID NO: 156 and 162; SEQ NO: 157 and 186 are related to SEQ ID NO: 57 and 119, respectively; SEQ ID NO: 158 and 187 are related to SEQ ID NO: 58 and 120, respectively; SEQ ID NO: 159 and 188 are full-length sequences of SEQ ID NO: 59 and 121, respectively; SEQ ID NO: 160 and 189 are full-length sequences of SEQ ID NO: 60 and 122, respectively; and SEQ ID NO: 161 is related to SEQ ID NO: 61 and encodes the same amino acid sequence.

### EXAMPLE 2

### Use of Sucrose Phosphate Phosphatase to Dephosphorylate sucrose-6-phosphate

[0106] The F. arundinacea and L. perenne FaSPP and LpSPP genes (SEQ ID NO: 7 and 8, respectively) share amino acid sequence identity with sucrose-6-phosphate phosphatase genes from other plant species (Lunn et al., Proc. Natl. Acad. Sci. USA 97:12914-12919, 2000). These genes were amplified by PCR using the primers given in SEQ ID NO: 191 and 192 to add an initiating methionine, and then cloned into the pET41a expression plasmid (Novagen, Madison, Wis.). These primers amplified nucleotides 263-1531 and 280-1548 for FaSPP and LpSPP, respectively. The resulting plasmids were transformed into E. coli BL21 cells using standard protocols, and protein expression was induced using IPTG.

[0107] The soluble recombinant protein was assayed for its ability to specifically dephosphorylate sucrose-6-phosphate (Suc-6-P) but not fructose-6-phosphate (Fru-6-P) using the procedure described by Lunn et al. (ibid.). The release of phosphate from Suc-6P and Fru-6-P was measured using the Fiske-Subbarow method of determining inorganic phosphate (SIGMA assay kit; Sigma, St Louis, Mich.), with the change in absorbance at 660 nm being proportional to the amount of phosphate released per unit time. As shown in FIG. 1, both the Festuca and Lolium SPP enzymes dephosphorylated Suc-6-P but not Fru-6-P, whereas control pET41 extract had no activity on either substrate.

### EXAMPLE 3

### Peroxidase Activity of Grass Enzymes Demonstrated by their Ability to Oxidize 2,2′azino-Bis.3-ethylbenzylthiazoline-6-sulfonic Acid (ABTS)

[0108] A number of L. perenne or F. arundinacea genes (SEQ ID NO: 48-54) share amino acid identity with peroxidase genes from other plant species (Hiraga et al., Plant Cell Physiol. 42:462-468, 2001). The putative amino acid secretion signal sequence was identified by signalP analysis of the Lolium and Festuca sequences and homology to known peroxidase proteins. Primers were designed to amplify DNA representing the mature protein (minus signal sequence; Table 3.). These genes were amplified by PCR to add an initiating methionine and then cloned into the pET25b expression plasmid (Novagen, Madison, Wis.). The resulting plasmid was transformed into E. coli AD494 (DE3) pLysS cells using standard protocols, and protein expression was induced using IPTG.

TABLE 3

| SEQ ID | SEQ ID NO | | Primers | DNA bp | Protein |
|---|---|---|---|---|---|
| NO DNA | PROT | Gene | SEQ ID NO: | amplified | codons |
| 50 | 112 | FaPER3 | 193 | 156-1077 | 24-326 |
| | | | 194 | | |
| 52 | 114 | LpPER5 | 195 | 120-1052 | 35-344 |
| | | | 196 | | |

[0109] The insoluble recombinant protein was solubilized and re-folded following protocols described for several recombinant Arabidopsis peroxidases (Teilum et al., Protein Exp. and Purif. 15:77-82, 1999). The insoluble inclusion bodies within E. coli were isolated from lysed cells by standard protocols and the recombinant protein solubilized in 8M urea. The solubilized peroxidase protein was refolded to gain active enzyme by diluting urea to 2M with 5 μM Heme, 0.25 mM Glutathione reduced, and 0.45 mM Glutathione oxidized, pH 8 (20 mM Tris-HCl). The refolded protein was used directly to assay peroxidase activity.

[0110] Peroxidase activity was measured by incubating recombinant peroxidase with pre-mixed ABTS/H₂O₂ liquid substrate (Sigma, St Louis, Mich.) and measuring ABTS oxidation by the increase in absorbance at 405 nm. Horseradish peroxidase of known activity (Sigma, St Louis, Mich.) was used as a positive control and boiled samples as a negative control. The results provided in FIG. 2 show that FaPER3 and LpPER5 (SEQ ID NO: 50 and 52, respectively) had similar activity to that of horseradish peroxidase in these assays.

### EXAMPLE 4

### Use of Grass Fructosyltransferase Genes to Synthesize Fructans

Transformation of N. benthamiana plants with Fructosyltransferase Genes

[0111] Sense constructs containing a polynucleotide including the coding region of fructosyltransferase genes isolated from L. perenne Lp1-SST and Lp6SFT1 (SEQ ID NO: 125 and 126, respectively) were inserted into a pART27 derived binary vector and used to transform A. tumefaciens LBA4404 using published methods (see, An et al., “Binary Vectors,” in Gelvin and Schilperoort, eds., Plant Molecular Biology Manual, Kluwer Academic Publishers: Dordrecht, 1988). The presence and integrity of the binary vector in A. tumefaciens was verified by polymerase chain reaction (PCR). The primers px17 (SEQ ID NO: 207) and px18 (SEQ ID NO: 208) were used to confirm the presence of the Lp1-SST construct, whereas the primers px19 (SEQ ID NO: 209) and px 20 (SEQ ID NO: 210) were used to confirm the presence of the Lp6-SFT-1 construct.

[0112] The A. tumefaciens containing the sense gene constructs were used to transform N. benthamiana leaf discs (Burow et al., Plant Mol. Biol. Report 8:124-139, 1990). Several independent transformed plant lines were established for the sense construct for each fructosyltransferase gene. DNA was isolated from transformed plants containing the appropriate fructosyltransferase gene construct using the QIAGEN DNAeasy Plant Mini Kit (Qiagen, Valencia, Calif.). Presence of the fructosyltransferase gene was verified using PCR experiments as shown in FIGS. 3 and 4. For the Lp6-SFT1 gene, the forward and reverse primers given in SEQ ID NO: 197 and 198 were used, respectively. These primers amplify nucleotides 1572-1980 of the Lp6-SFT1 gene which corresponds to a 406 base pair fragment. For Lp1-SST, the forward and reverse primers given in SEQ ID NO: 199 and 200 were used, respectively. These primers amplify nucleotides 1332-1740 of Lp1-SST, corresponding to a 414 base pair fragment.

Effects of Fructosyltransferase Genes on Fructosyltransferase Concentration in Transformed Plants

[0113] Fructans are not normally found in N. benthamiana plants; hence, if introduction of the sense fructosyltransferase constructs was successful, it should be possible to extract fructans from the transformed plants. The concentration of fructosyltransferase in the transformed plants was determined using the Fructan Assay Kit (Megazyme International Ireland Ltd, Wicklow, Ireland). Briefly, 300 mg of leaf material from the independent transformed plant lines containing the fructosyltransferase sense constructs were extracted individually at 80° C. with 1 ml 80% ethanol, followed by two 1 ml extractions with water. The ethanol and water extracts were combined and frozen overnight at −20° C. Extracts were centrifuged at 20,000 g to pellet chlorophyll. Clarified extracts were treated with 1% PVP-40 to precipitate phenolic compounds. These extracts were then reduced in volume by rotary evaporation.

[0114] Fructan levels were determined in these extracts using the Megazyme Fructan Assay kit. Briefly, sucrose, starch and reducing sugars are removed from the plant carbohydrate extracts by using sucrase, β-amylase, pullulanase and maltase, and then converting the resulting reducing sugars to sugar alcohols. The remaining fructans are hydrolyzed with fructanase and the reducing sugars produced (glucose and fructose) are measured by the 4-hydroxybenzoic acid hydrazide (PAHBAH) reducing sugar method. The final extracts are assayed for absorbance at 410 nm. As shown in FIG. 5, fructans could be detected in both the Lp1-SST and Lp6-SFT-1 transgenic lines. Fructan levels were highest in lines 07, 09 and 12 for Lp1-SST, and lines 05 and 12 for Lp6SFT-1.

### EXAMPLE 5

### Use of Sucrose Phosphate Synthase Enzymes to Synthesize Sucrose

[0115] A F. arundinacea gene (FaSPS-N; SEQ ID NO: 9) has been identified that shares amino acid sequence identity with sucrose phosphate synthase (SPS) from other plant species. SEQ ID NO: 7 and 8 are also SPS sequences, with SEQ ID NO: 7 being a Lolium perenne homologue of SEQ ID NO: 9. The FaSPS-N was cloned into the pcDNA3 mammalian expression plasmid and the resulting plasmid transfected into 293T mammalian cells (human embryonic kidney derived cells) using Lipofectamine 2000 reagent (Invitrogen, Carlsbad, Calif.).

[0116] Cell lysates from transfected cells were deionized on G25 spin columns and used in a sucrose synthesis assay. In this assay, mammalian cell extracts were tested for their ability to synthesize sucrose from fructose-6-phosphate and uridine 5′-diphosphoglucose. Following the synthesis reaction, hexoses were converted to sugar alcohols by boiling in the presence of 30% KOH. The sucrose synthesized was detected by the addition of 1.4% anthrone reagent in H₂SO₄ and incubating at 40° C. for 20 min. The change in absorbance at 620 nm is relative to sucrose in the reaction (Botha and Black, Aust. J. Plant Physiol. 27:81-85, 2000). In these experiments, introducing FaSPS-N alone into mammalian cells produced a sucrose synthesis activity that was not detected in non-transfected cells (FIG. 6).

[0117] A known cofactor for SPS is SPP. To test whether SPP is required for SPS activity, the L. perenne LpSPP gene (SEQ ID NO: 8) was cloned into the pcDNA3 mammalian expression plasmid. Both the FaSPS-N and LpSPP plasmids were co-transfected into 293T mammalian cells using Lipofectamine 2000 reagent (Invitrogen, Carlsbad, Calif.). Cell lysates from transfected cells were deionized on G25 spin columns and used in a sucrose synthesis assay as described above. As shown in FIG. 6, adding SPP did not significantly enhance or alter the sucrose synthesis activity of the cell extracts.

### EXAMPLE 6

### Use of Soluble Sucrose Synthase Enzymes to Cleave Sucrose

[0118] A F. arundinacea gene (FaSUS-1; SEQ ID NO: 13) was identified that shared amino acid sequence identity with soluble sucrose synthase enzymes (SUS) from other plant species. Three other soluble sucrose synthases were also identified (SEQ ID NO: 12, 14 and 15) with SEQ ID NO. 12 being a direct homologue from L. perenne. The FaSUS-1 gene was cloned into the pcDNA3 mammalian expression plasmid, which was transiently transfected into 293T mammalian cells (human embryonic kidney derived cells) using Lipofectamine 2000 reagent (Invitrogen, Carlsbad, Calif.). Transfected cells were grown for several days before harvesting (by scraping cells in a sucrose synthase buffer). Harvested cells were frozen on dry ice and freeze-thawed twice before pelleting cell debris by centrifugation. The resulting supernatant (cell lysate) was deionized on G25 spin columns and then used in a sucrose cleavage assay as described by Sebkova et al. (Plant Physiol. 108:75-83, 1995). In these assays, the cell lysates were tested for their ability to cleave sucrose in the presence of UDP to produce fructose and uridine 5′-diphosphoglucose. Following a 30 min incubation at 30° C., the enzyme activity was stopped by boiling the tubes for 1 min. Both NAD and UDP-glucose dehydrogenase were added and the change in OD at 340 nM (production of NADPH) was measured. As shown in FIG. 7, significantly higher levels of sucrose cleavage were observed in cells transfected with FaSUS1 construct than in non-transfected control cells.

### EXAMPLE 7

### Use of Acid Invertases to Cleave Sucrose

[0119] A number of acid (vacuolar and cell wall) invertase genes from L. perenne and F. arundinacea (SEQ ID NOS: 17, 19, 21, 23 and 135-141) were identified that share amino acid sequence identity with acid invertases from other plant species (Unger et al., Plant Physiol. 104:1351-1357, 1994; Goetz and Roitsch, J. Plant Physiol. 157:581-585, 2000). These sequences were analysed by SignalP and homology to identify signal regions and propeptide sequences, and primers were designed to amplify the DNA sequence encoding the mature protein (Table 4).

TABLE 4

| | | | Primers | | |
|---|---|---|---|---|---|
| SEQ ID | SEQ ID NO | | SEQ | DNA bp | Protein |
| NO DNA | PROT | Gene | ID NO | amplified | codons |
| 17 | 79 | LpCWINV1 | 201 | 137-1803 | 38-583 |
| | | | 202 | | |
| 19 | 81 | FaCWINV4 | 203 | 134-1912 | 26-597 |
| | | | 204 | | |
| 25 | 87 | LpSINV1 | 205 | 387-2124 | 104-668 |
| | | | 206 | | |

[0120] The PCR fragments were cloned into pPICZαA vectors for expression in methylotrophic yeast Pichia pastoris (EasySelect TM Pichia Expression Kit, Invitrogen, Carlsbad, Calif.). The sequences were cloned in frame with the α-mating factor for secretion of the recombinant invertase protein into liquid media, following similar methods described for the expression of barley 6-SFT and fescue 1-SST in P. pastoris (Hochstrasser et al., FEBS Letters 440:356-360, 1998; Lüscher et al., Plant Physiol., 124:1217-1227, 2000). The media was concentrated 10 fold by Vivaspin 30 kDa spin column (VivaScience, Hannover, Germany) to concentrate recombinant protein and used directly to assay invertase activity. Recombinant protein was assayed with 100 mM sucrose in 500 μl phosphate buffer pH5.0, at 30° C. for 1 hour. Release of glucose by invertase activity was measured using a glucose HK assay kit (Sigma, St Louis, Mich.). FIG. 8 shows the glucose released by invertase activity in terms of glucose concentration in the assay mix. As shown in FIG. 8, invertase activity was observed for the vacuolar invertase (LpSINV1; SEQ NO: 25) and the two cell wall invertases (LpCWINV1 and FaCWINV4; SEQ NO: 17 and 19, respectively) but not for an empty vector (pPICZalphaA) control.

### EXAMPLE 8

### Use of Tannin Genes to Modify Tannin Biosynthesis

[0121] Certain Arabidopsis mutants of the transparent testa (tt) phenotype do not make the anthocyanin pigment cyanidin and therefore have no seed coat color. The genes responsible for many of these mutants have now been identified as shown in Table 5.

TABLE 5

| Enzyme | Abbreviation | Locus | Chromosome |
|---|---|---|---|
| Dihydroflavanol-4-reductase | DFR | tt3 | 5 |
| Chalcone synthase | CHS | tt4 | 5 |
| Chalcone isomerase | CHI | tt5 | 3 |
| Flavanone 3-β-hydroxylase | F3βH | tt6 | 3 |

[0122] Over-expression of the maize genes for CHS, CHI and DFR has been shown to complement the Arabidopsis tt4, tt5 and tt3 mutants, respectively, thereby restoring cyanidin synthesis and seed coat color (Dong et al., Plant Physiol. 127:46-57, 2001). Complementation of these Arabidopsis mutants may therefore be employed to demonstrate the function of the inventive polynucleotides encoding enzymes involved in the tannin biosynthetic pathway.

[0123] Sense constructs containing a polynucleotide including the coding region of tannin genes isolated from L. perenne or F. arundinacea LpCHS, LpCHI, LpF3βH, LpDFR1, FaCHI and FaF3βH (SEQ ID NO: 157, 55, 161, 159, 56 and 62, respectively) under the control of the CaMV 35S promoter were inserted into a binary vector and used to transform Agrobacterium tumefaciens LBA4404 using published methods (see, An G, Ebert P R, Mitra A, Ha S B, “Binary Vectors,” in Gelvin S B, Schilperoort R A, eds., Plant Molecular Biology Manual, Kluwer Academic Publishers: Dordrecht, 1988). The presence and integrity of the binary vector in A. tumefaciens was verified by polymerase chain reaction (PCR) using the primer pairs described in Table 6.

TABLE 6

| | | Transparent | Forward Primer | Reverse Primer |
|---|---|---|---|---|
| Gene | SEQ ID NO: | testa line | SEQ ID NO: | SEQ ID NO: |
| LpCHS | 157 | tt4 | 211 | 212 |
| LpCHI | 55 | tt5 | 213 | 214 |
| LpF3βH | 161 | tt6 | 217 | 218 |
| LpDFR1 | 159 | tt3 | 215 | 216 |
| FaCHI | 56 | tt5 | 213 | 214 |
| FaF3βH | 62 | tt6 | 217 | 218 |

[0124] The A. tumefaciens containing the sense gene constructs are used to transform Arabidopsis by floral dipping (Clough and Bent, Plant J. 16:735-743, 1998). Several independent transformed plant lines were established for the sense construct for each of the tannin genes. Specifically, LpDFR1 constructs were transformed into Arabidopsis tt3 mutants, LpCHS constructs were transformed into Arabidopsis tt4 mutants, LpCHI and FaCHI constructs were transformed into Arabidopsis tt5 mutants, and LpF3βH and FaF3βH constructs were transformed into Arabidopsis tt6 mutants. Several independent transformed plant lines were established for the construct for each of the tannin genes. Transformed plants containing the appropriate tannin gene construct were verified using PCR.

[0125] The presence of cyanidin in the FaCHI transformed plants is demonstrated by a phenotypic change in plant seedling color and by analyzing cyanidin extracts made from transgenic plants grown under stressed conditions (Dong et al., Plant Physiol. 127:46-57, 2001). Briefly, cyanidins are extracted from plant tissue with an acid/alcohol solution (HCl/methanol) and water. Chlorophyll is removed by freezing the extracts followed by centrifugation at 4° C. at 20,000 g for 20 min. Any remaining chlorophyll is removed through a chloroform extraction. The absorbance at 530 nm is measured for each of the cyanidin extracts. Non-transgenic wild type and control Arabidopsis plants are used as controls.

### EXAMPLE 9

### Use of the Grass Ferulate 5′-hydroxylase Gene to Complement the Arabidopsis fah1-2 Mutant

Transformation of A. thaliana fah1-2 Plants with the Grass Ferulate 5′Hydroxylase Gene

[0126] A sense construct containing the polynucleotide sequence (including the coding region) of ferulate-5-hydroxylase isolated from L. perenne (LpF5H; SEQ ID NO: 44) was inserted into a pART27 derived binary vector and used to transform A. tumefaciens GV3101 using published methods (see, An et al., “Binary Vectors,” in Gelvin and Schilperoort, eds., Plant Molecular Biology Manual, Kluwer Academic Publishers: Dordrecht, 1988). The presence and integrity of the binary vector in A. tumefaciens was verified by polymerase chain reaction (PCR). The primers OLNB39 (SEQ ID NO: 219) and OLNB40 (SEQ ID NO: 220) were used to confirm the presence of the LpF5H gene construct.

[0127] The A. tumefaciens containing the sense gene constructs were used to transform A. thaliana mutant fah1-2 (Arabidopsis Biological Resource Centre CS6172, Columbus, Ohio) by floral dipping (Clough and Bent, Plant J. 16:735-743, 1998). Twenty-one independent transformed plant lines were established for the sense construct of the gene. The presence of the ferulate-5-hydroxylase gene in the transgenic plants was verified by PCR using the forward and reverse primers given in SEQ ID NO: 221 and 222, respectively.

Effects of the Grass Ferulate 5-hydroxylase Gene on Sinapoyl Malate Production in Transformed Plants.

[0128] The A. thaliana fah1-2 plants have altered phenylpropanoid metabolism (undetectable levels of sinapoyl malate, syringyl lignin and sinpoyl choline, probably due to lack of conversion of ferulate to 5-hydroxyferulate); hence, over-expression of the ferulate 5-hydroxylase gene should result in the production of sinapoyl malate in plant tissue.

[0129] The presence of sinapoyl malate in the transformed plants was determined using HPLC as follows. Briefly, 10 mg of leaf material from the independent transformed plant lines containing the ferulate 5-hydroxylase sense construct, were ground and extracted individually at room temperature for 30 min, with 100 μl 50% methanol. Extracts were centrifuged at 12,000 g for 5 min to pellet leaf debris and the supernatant removed to a fresh tube. These extracts were then reduced in volume by rotary evaporation to remove organic solvent before LC-MS analysis.

[0130] Sinapoyl malate levels were determined in these extracts using HPLC. Briefly, an aliquot of each sample was separated on a reverse phase column with the effluent being analysed in negative mode ionisation on an ion trap mass spectrometer. Extracted ion chromatograms were derived for each sample from the sum of both the intact sinapoyl malate and sinapinic acid ions (the latter formed from in source fragmentation). The peak heights from each sample chromatogram were recorded for comparison. As shown in FIG. 9, sinapoyl malate could be detected in the complemented LpF5H transgenic lines and not in the uncomplemented fah-1 mutant lines. Sinapoyl malate levels were highest in lines 782, 781 and 773. These results show that the Lolium perenne gene encodes a functional ferulate 5-hydroxylase protein which is able to complement the Arabidopsis gene mutant to restore the S-lignin pathway.

Effects of the Grass Ferulate 5-hydroxylase Gene on S-Lignin Production in Transformed Plants

[0131] The A. thaliana fah1-2 plants have altered phenylpropanoid metabolism and have undetectable levels of syringyl lignin (Chapple et al., Plant Cell 4:1413-1424, 1992; Meyer et al., Proc. Natl. Acad. Sci. USA 93:6869-6874, 1996). Over-expression of the ferulate 5-hydroxylase gene should result in the restoration of syringyl lignin in transgenic plant tissue, and the presence of syringyl lignin in mature stems could then be demonstrated using Maules stain.

[0132] Twenty four independent transgenic lines of the sense LpF5H (SEQ ID NO: 44) in fah1-2, the empty vector in fah1-2 and the empty vector in wild type Arabidopsis ecotype Columbia were tested. Plants were grown under long day conditions with 16 hours light, 8 hour night breaks, and tested at day 60 when floral stem had fully elongated and the siliques were maturing. The base of the floral stem was sectioned using a Leica vibratome to obtain transverse sections of 80 μm thickness. The sections were incubated in 0.5% KMnO₄ for 10 minutes followed by incubation in 10% HCl for 5 minutes. The sections were then washed twice with water before re-suspension in concentrated NH₄OH. The sections were visualized using light microscopy. The Maules reagent stains S-lignin a red colour and G-lignin a yellow to orange color. In the complemented fah1-2 plants over-expressing LpF5H, a red coloration was observed constitutively in both vascular bundles and intervascular cell walls, indicating restoration of S-lignin. The transverse sections of the empty vector fah1-2 mutant stained a yellow to orange color, with greater intensity around the vascular tissue, indicating the absence of S lignin. In the empty vector wild type stems an orange coloration (G-lignin) was observed in the cell walls of the vascular bundles in comparison to predominantly red (S-lignin) coloration of the intervascular cells, suggesting that these cells contained both S and G lignin. These results show that the LpF5H gene is functional and can restore S-lignin in the fah1-2, S-lignin deficient mutant. The constitutive production of S-lignin compared to the wild type is probably due to use of the cauliflower mosaic virus 35S promoter to drive the LpF5H transgene. This ectopic expression leads to production of S-lignin in cells not usually producing this type of lignin. These results show that LpF5H is useful to manipulate lignin monomer formation in planta.

[0133] SEQ ID NOS: 1-222 are set out in the attached Sequence Listing. The codes for nucleotide sequences used in the attached Sequence Listing, including the symbol “n,” conform to WIPO Standard ST.25 (1998), Appendix 2, Table 1.

[0134] All references cited herein, including patent references and non-patent publications, are hereby incorporated by reference in their entireties.

[0135] While in the foregoing specification this invention has been described in relation to certain preferred embodiments, and many details have been set forth for purposes of illustration, it will be apparent to those skilled in the art that the invention is susceptible to additional embodiments and that certain of the details described herein may be varied considerably without departing from the basic principles of the invention.

The application's sequence listing, which the Patent Office published only in electronic form, follows.

SEQUENCE LISTING (222 sequences)

SEQ ID NO: 1 - DNA, 2106 bp, Lolium perenne
gacttagccttcctcggaaccatcgaccgggccgccgccgacgcgacgcgacgcgatggagtccagcgccgtcgtccccggcaccacggcgccgctgcttccttatgcgtacgcgccgctgccgtcgtcctccgacgacgcccgtgaaaacagaagtagcggcggcgtgaggtggcgcgcgtgcgccgtcgttctggcggactcggcgttggcggtggtggtcgtggtcgggctcctcgcgggcggcagggtggatcgggtcccggccggcgcagacgtggcgtcggccacggtgccggccgtgccgatggagttcccgaggagccggggcaaggacttgggcgtgtcggagaagtcctccggtgcctactccgccgacggcgggttcccgtggagcaacgccatgctgcagtggcagcgcaccgggttccatttccagccggagcagcactacatgaacgatcccaacggccccgtgtactacggcggatggtaccacctcttctaccagcacaaccccaagggcgacagctggggcaacatcgcctgggcccacgccgtgtccaaggacatggtcaactggcgccacctcccgctcgccatggttcccgaccagtggtacgacagcaacggcgtcctcaccggctccatcaccgtgctccccgacggccaggtcatcctgctctacaccggcaacaccgacaccctagcccaggtccagtgcctcgccacgcccgccgacccgtccgacccgctcctccgcgaatggatcaagcaccccgccaaccccatcctcttcccgccgcccgggatcgggctcaaggacttccgcgacccgctcaccgcctggttcgaccactccgaccacacctggcgcaccgtcatcgggtccaaggacgacgacggccacgccggcatcatcctcagctacaagaccaaggacttcgtcaactacgagctcatgcccgggaacatgcaccgcgggcccgacggcaccggcatgtacgagtgcatcgacctctaccccgtcggcggcaactcgtcggagatgctcggcggcgacgactcgcccgacgtgctcttcgtgctcaaggagagcagcgatgacgaacgtcacgactactatgcgctcggaaggttcgacgccgtcgccaacgtttggacgcccatcgaccgggacctggaccttgggatcgggctcagatacgactggggaaagtactacgcctccaagtccttctacgaccagaagaagaaccgccgcatcgtatgggcatacatcggcgagaccgactccgagcaggccgacatcaccaagggatgggccaatctcatgacgattccaagaacggtggagcttgacaggaagacccgcacaaacctcatccaatggccagtggaggaggtcgacaccctccgcaggaactccacggacctcggtcgcatcaccgtcaacgccggctccgtcattcgcctccccctccaccagggcgctcaactcgacatcgaggcctccttccaactcaactcttccgacgtggatgctatcaacgaggccgacgtcggctacaactgcagcaccagcggtgccgccgtacggggggcgctcggcccctttggcctcctcgtccttgccaatggccgcaccgaacagacggctgtgtacttctacgtgtccaagggcgtcgacggcggcctccagacccacttttgccacgacgagtcacggtcaacacgggcaaaggatgtcgtgaataggatgattggcagcatcgtgccggtgcttgacggtgagaccttttcggtgagggtgctagtggaccactccatcgtgcagagcttcgcgatgggcgggaggatcacggcgacgtcgcgggcgtacccgacggagaccatctacgcggccgcaggggtctacctcttcaacaacgccacgggcgccaccgtcaccgccgagaggctcgtcgtgcacgagatggcctcagctgacaaccatatcttcacgaacgacgacttgtagatgaaaccaagtttagctcgtgttgcattcttgttaacggccggtgattgcctatctacacattcatttggcgttcaaaaaaaaaa

SEQ ID NO: 2 - DNA, 2293 bp, Festuca arundinacea
gcatagtccactcagccttcctcggaaccatcgaccgggccgccgccgacgcgacgcgacgcgatggagtccagcgccgtcgtccccggcaccacggcgcggctgcttccttatgcgtacgcgccgctgccgtcgtccgccgacgacgcccgtgaaaaccagggtagcgacggcgtgaggtggcgcgcgtgcgccgccgtgttggccgcctcggcgttggcggtgctggtcgtggtcgggctcctcgcggggggcagggtggatcggccgggtccggccgcggtgccggcggtgccgacggagatcccgaggagccggggcaaggacttcggcgtgtcggagaagtcgtccggggcctactccgccgacggcgggttcccgtggagcaacgccatgctgcagtggcagcgcaccgggttccacttccagccggagcagcactacatgaacgatcccaacggccccgtctactacggcggatggtaccacctcttctaccagtacaaccccaagggcgacagctggggcaacatcgcgtgggcccacgccgtgtccaaggacatggtcaactggcgccacctcccgctcgccatggtgcccgaccagtggtatgacagcaacggcgtcctcaccggctccatcaccgtgctccccgacggccgggtcatcctgctctacaccggcaataccgacaccctggcccaggtccagtgcctcgccgagcccgccgacccgtccgacccactcctccgcgaatggatcaagcacccggccaaccccatcctcttcccgccgcccgggatcggcctcaaggacttccgcgaccccctcaccgactggttcgatcactccgacgacacctggcgcactgtcattgggtccaaggacgacgacggccacgccggcatcatcctcagctacaagacaaaggacttcgtcaactacgagctcatgccggggaacatgcaccgaggccccgacggcaccggcatgtacgagtgcatcgacctctacccagtgggcggcaactcgtcggagatgctcggcggcgacgactcgcccgacgtgctctttgtgctcaaggagagcagcgatgacgagcgtcacgactactacgcgctcgggaggttcgacgccgccgccaacatttggacacccatcgaccaggagctggacctcgggatcgggctcaggtacgactggggaaagtactacgcctcaaagtccttctacgaccagcggaagaaccgccgcgtcgtatgggcctacatcggcgagaccgactccgagcaggccgacatcaccaagggatgggccaatctcatgacgatcccaagaacggtggagcttgacaagaagacccggacaaacctcatccaatggccagtggaggaggtcgacaccctccgcaggaactccacggacctcggtcgcatcaccgtcaacgccggctccgtcattcgccttcccctccaccaaggcgctcaactcgacatcgaggcctccttccagctcaactcttccgacgtggatgctctcaacgaggctgacgtcggctacaactgcagcaccagcggtgccgccgtgcgtggggcgctcggcccctttggcctcctcgtccttgccaacggccgcaccgaacagacggctgtgtacttctacgtgtccaagggcgttgatggcgccctccagacccacttctgccacgacgagtcacggtcgacgcgggcaaaggatgttgtgaataggatgattggcagcatcgtgccggtgcttgacggtgagaccttctcggtgagggttctattggaccactccatcgtgcagagcttcgcgatgggtgggaggatcacagcgacgtcgcgggcgtacccgactgaggctatctacgcagcggcgggggtctacgtcttcaacaacgccacgggtgccaccgtcactgccgagaggctcgtcgtgtacgagatggcctcggctgacaaccatatcttcaggaacgacgacttgtagatgaaaccaagtcgagctcttgttgcattcatggtcatcggtgatcgcccctgtctacacatccatttggcattcggtcggcgggttcctcgatcttgtcatggatggggatcaagatggagtacaatagttttcggtttgtttttttgtatcggtgagatgaatggaaattagatgactgtcctgcccccaagtgcaactatctgcaggagcacttctgcagtgactatgatgacggtgtcatgtatcaactgtaccagatctttttaattgaaaaaaaaaa

SEQ ID NO: 3 - DNA, 2072 bp, Festuca arundinacea
gcccatccaccggagtatactaggaaattcctgcaactcgacctcgcgttgggaattccggcaatggagtcccgggcctttcccaacgcggcgtacgcgccacttctgccacccaccgctgacgacgccaccctgggcaagcaggaccgccccggcgtggggtggcgcgggttcttaaccgtgctggccgcgtctggcgtggtggtgctcctcgtcgctgccactatgctcgcgggatccaggatgggtcaggcaggcgacaccgacgaggacggggccggagggttcccgtggagcaacgagatgctgcagtggcagcgcgccgggttccattaccagcccgaggggcacttcatgagcgatccagacggtccggtatactaccgtggatattaccacctcttctttcagtacaaccgaaggggcgtcgcgtgggatgactacatagagtggggccacgtggtgtcccaggacctggtacactggcgccctctcccactggccctgcggcctgaccattggtacgacaagaagggcgtcttgtcgggtaccatcacggtgctccacaatggcacgctcgtcctgctctacacgggggtcacagaagaccctatggccgagtctcagtgcatcgccgtcccgaccgaccccaacgaccccctccttcgccattggaccaagcaccccgccaaccctgttctcgctcacccacagggggtccagggcatggacttccgagaccccaccagtgcatggtttgacaagtccgacgccacgtggcgcattctcatcggttccaaggatgacgacaatggaagccacgctggcatcgccttcatcttcaagaccaaggacttccttagcttcgagcgcgtcccaggtatcgtgcatcgtgtcgagggtaccggtatgtgggagtgcatcgacttttaccccgtcggaggtggccacaactcttcgtcggaggagctgtacgtgataaaggcgagcatggacgacgaacgacacgactactactcattggggagatatgacgcggcagccaacacatggacgccattggacgccgagctagacttggggattgggctgagatacgactggggcaagctctacgctgccacgtcgttctacgatccgctgaagcagcggcgaattatgttggggtatgtaggcgagaccgactctgcacgagccgacgttgccaagggatgggcctcacttcagtcgattccgaggacagtgacactagacgagaagaccaggacgaacctcctcctatggccggtggaggaggtggaggccctccgctacaactccaccgacctcagtggcatcactgttgacaacggctcagtcttccacctccccctccaccaagccactcacctggacatcgaggcttccttccgcctcgacgcttctgacgttgccgccatcaacgaggccgatgtcggctataactgcagcagcagcggtggcgcggccgcacgtggcgctatcggccccttcggcctcctcgtccatgccgccggagacctccgtggcgagcagacggcggtgtacttctacgtgtccagggccctcgacggtaccctccggactagcttctgcaacgacgagacgcggtcgtcacgggccagggacgtgacgaagcgggtggtgggcagcacggtgccggtgctccacggtgaggcgttgtcgatgagggtgctcgtggaccactccatcgtgcagagcttcgccatgggtgggagagtcacggcgacctcgcgggtgtacccaacggaggccatctacgccagggcaggggtgtacctgttcaacaacgctaccggcgccagcgtgactgcggagaggctcatcgtgcacgagatggcctcggcggtatacgacgagaccctgatcatggttgaggactcgtagctgctcacatgagctatatatcagaccggtaacgttgggtcacttgcatttccaagcgttgaataatttacttagcttagcaagcaacaggtccgaggttccaagtaaggggtgggatttttttcccggtttccaaaaaaaaaaaa

SEQ ID NO: 4 - DNA, 2207 bp, Lolium perenne
gcacccatccaccggaatatatatactagtcaggaaattcctgcaactcgacctcgagttgggaattccggcaatggagtcccgggcctttcccagcgcggcgtacgcgccacttctgccatccgccgcagacgacgtcgccctggccaagcaggaccgccccggcgtggggtggcgcgggttcttaaccgtgctggccgcctgcggcgtggtggtgctcctcgtcggtgccactttgctcgcgggatccaggatgggtcaggcaggcgacggcgaaggcaacaccgacgaggatggggccggagggttcccgtggagcaacgagatgctgcagtggcagcgcgccgggttccattaccagccggaggggcacttcatgagcgatccaaacggtccagtatactaccgcggatattaccacctcttctttcagtacaaccgaaggggcgtcgcgtgggatgactacatagagtggggccacgtggtgtcccaggacctggtacactggcgccctctcccactggccatgcggcctgaccattggtacgacaagaagggcgtcttgtcgggtaccatcacggtgctccacaatggcacgctcgtcctgctctacacgggggtcacagaagaccctatggccgagtcccagtgcatcgccgtcccgaccgaccccaacgaccccctccttcgccattggaccaagcaccccgccaaccccgtccttgctcacccacagggggtccagggcatggacttccgagaccccaccagcgcgtggtgggacaagtccgatgccacgtggcgcattctcatcggttccaaggacgacgacaacggcagccacgctggcatcgccttcatcttcaagactaaggacttccttagcttcgagcgtgtcccaggtatcgtgcatcgtgtcgagggcaccggcatgtgggagtgcatcgacttttaccccgtcggaggtggccacaactcttcgtcggaggagttgtacgtgataaaggcgagcatggacgacgaacgccacgactactactcattggggaggtacgacgcggcagcgaacacatggacgccattggacgccgagctagacttggggattgggctgagatacgactggggcaagctctacgcttccacgtcgttctacgatccggtgaagcagcggcgcattatgttggggtatgtaggcgaggtcgactctgcgcgagccgatgttgccaagggatgggcctcgcttcagtcgattccgaggacagtggcgctagacgagaagacccgaacgaacctcctcctatggccggtggaggaggtggaggccctccgctacaactccaccgacctcagcggcatcaccattgacaacggctccgtcttccacctcccactccaccagaccactcagctggacatcgaggcttccttccgcctcgacgcttctgatgttgccgccatcaacgaggccgacgtcggctacaactgcagcagcagcggcggcgcggcggcacgtggcgctctcggccccttcggcctcctcgtccatgccgccggagacctccgtggcgagcagacggcggtctacttctacgtgtccagggccctcgacggtaccctccggaccagcttctgcaacgacgagacgcggtcgtcgcgggccagggacgtgacgaagcgggtggtgggcagcacggtgccggtgctcgacggcgaggcgttgtcgatgagagtgctcgtggaccactccatcgtgcagagcttcgcgatgggcgggaggaccacggcgacctcgcgcgtgtacccgacggaggccatctacgccagggctggggtgtacctgttcaacaacgccaccggcgccggcgtgacggcggagaggctcatcgtgcacgagatggcctcggcggtatacgacgagaccctcatggttgaggactcatagctgctcacccgtaacgttgggtcacttgcatttccaagcgttgaattaataatttacttgttgtagcagcaagcaacggtccaaggttccaagtaaggtgggatattataccaaactccgcaagtcccgcaaggttgtgtaggtgtaagttaatgttggcgcacctgcgcgtgtgcatgtaagttgttgtatttgttgttcttttaaaaaagaaagataccaatctaccatcctatgtaagcataaaaaaaaaaaaaaaaaa

SEQ ID NO: 5 - DNA, 2163 bp, Festuca arundinacea
gaattcctgcaactcgacctcgagttgggaattccggcaatggagtcccgggcctttcccagcgcggcgtacgcgccacttctgccacccaccgctgacgacgccaccctgggcaagcaggaccgccccggcgtggggtggcgcgggttcttaaccgtgctggccgcgtctggcgtggtggtgctcctcgtcgctgcctctttgctcgcggggtccaggatgggtcaggcaggcgacggcgaaggcaacaccgacgaggacggggccggagggttcccgtggagcaacgagatgctgcagtggcagcgcgccgggttccattaccagcccgaggggcacttcatgagcgatccagacggtccggtatactaccgtggatattaccacctcttctttcagtacaaccgaaggggcgtcgcgtgggatgactacatagagtggggccacgtggtgtcccaggacctggtacactggcgccctctcccagtggccatgcggcctgaccattggtacgacaagaagggcgtcttgtcgggtaccatcacggtgctccacaatggcacgctcgtcctgctctacacgggggtcacagaagaccctatggccgagtcccagtgcatcgccgtcccgaccgaccccaacaaccccctccttcgccattggaccaagcaccctgccaaccctgttctcgcacacccacagggggtccagggcatggacttccgagaccccaccagcgcatggtttgacaagtccgacgcgacgtggcgcattctcatcggttccaaggacgacgacaatggaagccacgctggcatcgccttcatcttcaagaccaaggacttccttagcttcgagcgcgtcccgggtatcgtgcatcgtgtcgagggtaccggtatgtgggagtgcatcgacttttaccccgtcggaggtggccacaactcttcgtcggaggagctgtacgtgataaaggcgagcatggacgacgaacgacacgactactactcattggggagatatgacgcggcagccaacacatggacgccattggacgccgagctagacttggggattgggctgagatacgactggggcaagctctacgctgccacgtcgttctacgatccgctgaagcagcggcgaattatgttggggtatgtaggcgagaccgactctgcgcgagccgacgttgccaagggatgggcctcacttcagtcgattccgaggacagtgacactagacgagaagaccaggacgaacctcctcctatggccggtggaggaggtcgaggccctccgctacaactccaccgacctcagtggcatcactattgacaacggctcagtcttccacctccccctccaccaagccactcagctcgacatcgaggcttccttccgcctcgacgcttctgacgttgccgccatcaacgaggccgacgtcggctacaactgcagcagcagcggtggcgcggccgcacgtggcgctatcggccccttcggcctcctcgtccatgccgccggagacctccgtggcgagcagacggcggtgtacttctacgtgtccagggccctcgacggtaccctccggaccagcttctgcaacgacgagacgcggtcgtcacgggccagggacgtgacgaagcgggtggtgggcagcacggtgccggtgctcgacggtgaggcgttgtcgatgagggtgctcgtggaccactccatcgtgcagagcttcgccatgggtgggagagtcacggcgacctcgcgggtgtacccgacggaggccatctacgccagggcaggggtgtacctgttcaacaatgccaccggcgccagcgtgactgccgagaggctcatcgtgcacgagatggcctcggcggtgtacgacgagaccctcatggttcaggactcatagtttctcacatgagctatcagactggtaacgttgggtcacttgcatttccaagggttaaataatttacttagcgtagcaactggtccgaggttccaagtaaggtgggatattcttccaaactccgcgagtcccgtcaggttgtgttggtgtgagtgtgatgttggcgcacctgcgcgtgtgcatgtaagttgttgtatttgttgtttctatacctaataataaaggaaaaaggatttctccctaaaaaaaaaa

SEQ ID NO: 6 - DNA, 2200 bp, Lolium perenne
agccgaggcacccatccaccggagtatactagctaggaaattcctgtgcaactcgacctcgagtttggaattccggcaatggagtcccgggactttcccagcgcggcgtacgcgccacttctgccatctgccgcagacgacgtcgccctggccaagcaggaccgccccggcgtggggtggcgcggcttcttaaccgtgctggccgcctgcggcgtggtggtgctcctcgtcgctgcctctttgctcgcggggtccaggatgggtcaggcaggcgacaccgacgaggacggggccggagggttcccgtggagcaacgagatgctgcagtggcagcgcgccgggttccattaccagccggaggggcacttcatgagcgatccagacggtccggtatactaccgtggatattaccacctcttctttcagtacaaccgaagaggggtcgcgtgggatgactacatagagtggggccacgtggtgtcccaggacctggtacactggcgccctctcccactggccatgcggcctgaccattggtacgacaagaagggcgtcttgtcgggtaccatcacggtgctccacaatggcacgctcgtccttctctacacgggggtcacagaagaccctatggccgagtcccagtgcatcgccgtcccgaccgaccccaacgacccccttcttcgccattggaccaagcaccccgccaaccccgttctcgctcacccacagggggtccagggcatggacttccgagaccccaccagcgcgtggtgggacaagtccgactccacgtggcgcattctcatcggttccaaggacgacgacaacggcagccacgctggcatcgccttcatcttcaagaccaaggacttccttatcttcgagcgtgtcccaggtatcgtgcatcgtgtcgagggtaccggcatgtgggagtgcatcgacttttaccccgttggaggtggccacaactcttcgtcggaggagttgtacgtgataaaggcgagcatggacgacgaacgacacgactactactcattggggaggtatgacgcggcagcgaacacatggacgccattggacgccgagctagacttggggattgggctgaggtacgactggggcaagctctacgcttccacgtcgttctacgatccactgaagcagcggcgaattatgttggggtatgtaggcgatgtcgactctgcgcgagccgacgttgccaagggatgggcctcacttcagtcgattccgaggacagtggcactagacgagaagacccggacgaacctcctcctatggccggtggaggaggtggaggccctccgctacaactccaccgacctcagcggcatcactgttgagaacggctccatcttccacctccctctccaccaagccactcagctggacatcgaggcttccttccgcctcgatgcttctgatgttgctgccatcaacgaggccgacgtcggctacaactgcagcagcagcggtggcgcggccgctcgtggcgctctcgggcccttcggcctcctcgtccatgccgccggagacctccgtggcgagcagacggcggtgtacttctacgtgtccagggccctcgacggtagcctccggaccagcttctgcaacgacgagacgcggtcgtcacgggcccgggacgtggcgaagcgggtggtgggcagcacggtgccggtgctcgacggcgaggtgttagcgatgagggtgctcgtggaccactcgatcgtgcagagcttcgcgatgggtggaagggtcacggcgacgtcgcgggtgtacccaacggaggctatctacgccagggcaggggtgtacctgttcaacaacgccaccggcgccagcgtgacggcggagaggctcatcgtgcacgagatggcctcggcggtatacgacgagaccgtcatggttaaggactcatagctgctcacacatgagctatcagaccggtaacgttgggtcactagcattttcaagcgttaggataatttacttggcgtagcaagccccgggtccgaggttccaaaagtaaggtgggatattcttccaaactccgcgagtcccgcaaggttgtctaggtgtaagtgtaatgtcgtttgcgcacctgcgcgtgagcttgtaatttgctggatttgttgtttatttacagaaaaaaaaggatactatactatgtaagtatctacat

SEQ ID NO: 7 - DNA, 1756 bp, Festuca arundinacea
cccatctctcccgaaacaaccgctcgccacccgtctccctcccctgccctcgcctccccattccccttcctcttcttcccttggcgacggcctcgtcgatcggacccaatctccaccaaacgcgcctccggatctcgcgcgccgcctcgaaggggatcctcccgtggccgccgtcctcctccgccgctcggctggactgtcgtggagcggggatcgacccgggctctctgtcgctggttgctaaaatggataagctcaatggttctgcgcgtcttatgattgtttcagacctcgatcatacaatggttgatcatcatgacgaagagaacttgtcgttgcttaggtttggggccctttgggagtctgcttactgtcaggattctctacttgtcttctcgaccggaagatcacccactctctataaggaattgaggaaagagaagcctatgctaactccagacatcactattatgtcggtgggcagtgagataacttatggtgaggccatggttcctgatgatggctgggaggaatatctgaacaataagtgggacagaaatattgttcttgaggagaccgctaagtattctgagctgaagcttcagccagagacagaacagcgtccacataaggtcagcttcttggttgacaagaagagtgctcaggaagtgataaagtctctctctgagaagtttgagaaacgtggggtagatgcaaaaataatctatagtggtggccaagaccttgacatattagctcaaggggctggaaagggtcaggcgcttgcatatttactcaagaagttcgcctcatgcgggaaaacacccaacaatactcttgtttgtggtgactctggcaatgatgcagaattattcagcatccctggtgtgcacggtgtcatggttagcaatgcccaagaggaactactccagtggcatgcagaaaatgcgaaggataaccctaaggtaattcatgcaactgagaggtgtgctgctggtattattcaagctattgggcacttcaagctaggacctaatatttctccaagagacattgagtttccttacgtcaaggaggactctttcaagcctacagcggctgttgtgaagttctatgttctctgcgagaagtggcgtagggctgacgttccaaaggctgattcagttatagagtacttcaaaaacatcacggatgcaagtggagttattattcatccctctggcctcgaactttcgatccattcttccatcgatgcgttggcttcatgttatggtgacaaacaagggaaaaagtaccgatcatgggtggacagactagttatctcacagactgcttctgacagttggcttgtgagatttgacttgtgggaggcagaaggtgatgcatgggtgtgctgtttgacaactcttgcgctgaatgtaaagcctgaaacccctgggggtttcgtggtaacacacatccacaagacatggctcaaagaatattccggggatgagcaggcgtccaaactctagactggatctctaccgtcagcgcacgggaaggaaattttcttgagaatcaaataagaagcgcacagaaaacacgagaatttcttttccttgttcataatgttaataagtgctcccagacactacatatatcatactggatgaagtatacggaggtcttgatgcttggcctaatgcttacttgatgtgtaagataaaaatattatatctcgttactggcatgagaagctgaagtaaaaaaaaaa

SEQ ID NO: 8 - DNA, 1778 bp, Lolium perenne
ggaaccacaaaggcgctcgcccatctctcctccttcccgaaacaaccgctcgccacccgtctcccctcccctgccctcgcctccccattcccctccctcttcttcccttggccacggcctcctcgatcggacccaatctccaccacacgcgcctccggatctcgcgcgccgcctccaaggggatcctcccgtcctcccccgccgctcggctggaccgtcgtcgagcggggatcgacccgggctctccgtcgctggttgctaaaatggataagctcaatggttctgcgcgtctcatgattgtttcagacctcgaccatacaatggttgatcaccatgacgaagagaacttgtctctgcttaggtttggggccctttgggagtctacttactgccaggattctcttcttgtcttctcgaccggaagatcgcccactctctataaggaattgaggaaagagaagcctatgctgactccagacatcactattatgtcggtgggcagtgagattacttatggcgaggccatggttcctgatgatggctgggaggaatatctcaacaataagtgggacaagagtattgttcttgaggagaccgctaagttttctgagctgaagcttcaggcagagacagaacagcgtccacataaggtcagcttcttggttgacaagaagactgctcaggaagtgatcaagtctctctctgaaaagtttgagaaacgtggggtagatgcgaaaataatctatagtggtggccaagaccttgacatattagctcaaggggctggaaagggtcaggcgcttgcatatttactcaagaagttcgcctcatgcgggaaaacacccaacaatactcttgtttgcggtgactctggcaatgatgcagaattattcagcatccctggtgtgcacggtgtcatggttagcaatgcccaagaggaactactccagtggcgtgcagaaaatgcgaaggataaccctaaggtaattcatgcaactgagaggtgtgctgctggtattattcaagctatcgggcacttcaagctaggacctaatgtttctccaagagacgttgagtttccttacgtcaaggaggactctttcaagcctacagcggctgttgtgaagttctatgttctctgcgagaagtggcgtagggctgacgttccaaagactgattcagttatagagtacttcaaaaacatcacggatgcaagtggagttattattcatccctctggccttgaactttcgatccattcttccatcgatgcgttggcttcatgttatggtgacaaacaagggaaaaagtaccgatcatgggtagacagactagttatctcacagactgcttctgacagttggcttgtgagatttgacttgtgggaggcagaaggtgataagtgggtgtgctgtttgacaactcttgcgctgaatgtaaagcctgaaacccctgggggtttcgtggtaacacacatccacaagacatggctcaaagaatattccggggatgagcaggcgtccaagctctagactggatctccaccggcagcgcacgggaaggaaattttcttgagaatcaaataagaagcgcacagaaaacatgagaatttctttttcttgttcataatgttaataagtgctcccagacactacatatatcatactggatgaagtctacggaggtcttcggctaatgcttacttgatgtgtaagataaaaatattatatcttgttactgcatgagaagctgaagtaaatgatcccaaaaaaaaaaaa

SEQ ID NO: 9 - DNA, 3629 bp, Festuca arundinacea
agtagcctgcctgctcgccggcgagagatagctagggagggagggtaactagcgcaggaggagcctgctcgcctgccgtcgagatggcggcggggaacgagtggatcaacgggtacctggaggcgatcctggacgccgggtcgaagctgcggccgcagggcgtgcagctgccgccgctggagacggcgccggcgctcgcggccgaggagtccggcgccgcctacaaccccaccaggtacttcgtggaggaggtggtcaggagcttcgacgagcaggccctccacaagacatggacaaaggtggttgcgatgcggaacagccaggagcgcagcaaccggctggagaacctgtgctggaggatctggaacgtctccaggcagaagaagcaggtggagtgggattacacgaaagaggtggcccggcggaagcttgagcaggagctgggcagccgggaggccgccgaggacctctccgagctctccgagggcgagaaggataccaccaccgccaagcctgacgccgcaaccgctcaaccgtccaccgacgatggcgagcaccagcagccacaaccacgcacccggctcgcgaggatcaactccgaggtgcggctcgtctccgacgacgaggaggagcagaccaagaagaggaacctctacatcgtcctcatcagcatccatgggctggtgcgcggggagaacatggagctcggccgagactccgacaccggaggccaggtgaagtacgtggtggagctggcccgtgcgctggcggccacggcgggggtgcaccgcgtggacctgctgacgcggcagatctcctgccccgacgtggactggacctacggcgagccggtggagatgctggagcgcctgtcgtcggcggacgcggacgaggacgacggcgagcagtctggcggcggggcgtacatcgtgcggctgccgtgcgggcccagggaccagtacatccccaaggaggagctgtggccgcacatcccggagttcgtggaccgcgcgctctcgcacgtcaccgaggtggcgcgcgcgctaggcgaccagctccagcctcctcccactccggccgcgggcgacggcgcagccctagtggcagcgcccatatggccgtacgtgatccacggccactacgcggacgcggcggaggtggcggcgaacctggcgagcgcgctgaacgtgcccatggtcatgacgggccactcgctggggcgcaacaagctggagcagctgctcaagctgggccgcatgccgggccccgagatccagggcacctacaagatcgcgcgccggatcgaggccgaggagaccggcctcgacaccgcggagatggtggtcaccagcaccaagcaggagatcgaggagcagtggggcctctacgacggcttcgacctcatggtggagcgcaagctcagggtaaggcagcgccgcggcgtcagcagcctcggcaggtacatgccgcgcatggcggtcatcccgcccggcatggacttcagcttcgtcgagacacaggacacggctgagggggatggcgccgacctgcagatgctcattgcccccgacaaggccaagaaggctctgcctcccatttggtcggacgtgctgaggttcttcacgaacccgcacaagccgatgatcctggcgctgtcgcggccggacccgaagaagaacgtcactacgctgctcaaggcctacggcgagagccgccagctccgggagctcgcgaacctgactttgatactggggaacagggatgacatcgaggacatggccggcggcggcggcgcggtgctcacggcggtgctcaagctcatcgaccgatacgacctctacggccaggtggcctatccaaagcaccacaagcagacggacgtgcctcacatctaccgcctcgctgcaaagaccaagggagtattcaccaacccagctcttgtagagccgttcggcctcacaatcatcgaggctgctgcttacggtttgccggtggtcgcaaccaagaacggagggccggtggacatcctcaaggcgctcaacaacgggctgctggtggacccgcactcggcggaggcgatcaccggcgccctgctgagcctgctggccgagaagtcgcggtgggtggagtgccgccgcaacggcctccgcaacatccaccgcttctcgtggccgcaccactgccgcctctacctctcccacgtctccacctactgcgaccagccctcgccgcaccagcctctccgcgtgcccctcggcctgggctcctcgaccagcttcggcgcagacgactcgctctcggactcgctccgcggcctctcgctccagatatccgtggacgcctccagcgacctcaacgccgcggactccgcggccgccatcatggacgcgctccgccggcgcccggcctccgagaagccggcgagctccggtgccagggcgctcggcttcgcgcccggccggcgggagagcctcctggtggtcgccgtcgactgctacggcgacgacggcaagccggacgtcaagcagctaaagaaggccatcgacgcggcggtgtcggttggtgaatgcgcgggagctaagcaggggtacgtgctgtcgaccggcatgaccatccccgaggccgcggaggcgatcaaggcgtgcggcgccgacgttgccagcttcgacgcgctgatatgcagcagcggggccgagctatgctacccgtggaaggagctcgcggccgacgaggagtactccgggcacgtcgcgttccggtggcccggtgaccacgtgaaatccgccgtgcccaggctcgggagcttggaggagatcgccctcgcaatcgatcgccccgcctgctccgtgcactgccacgcctacgccgccacggacgcatccaaggtgaagaaggtggattcgatcaggaagtcgctgcggatgcgcgggttccggtgcaacctcgtctacacgcgcgcgtgcacgcgcctcaacgtcatccccctctccgcttcccggccgcgcgctctcaggtacctgtcgatacagtgggggatcgatctctccaaggtggcggtgctcgtcggcgagaccggcgacaccgaccgcgagaggctcctcccgggagttcacaagacgctcatcctgccgggaatggtcgcccgcggcagcgaggagctcctccgaggcgacgacgggtacaccatggcggacgtcgtggccatggactcccccaacattgtcacgctcgccgaaggccagtctgcctccgacctcctcaaggccatctgagagcgtgctctgctgctccctgtgctgcttctgttttccacatctgggacgcagtagcttcacttggattgtttcgcctgtgattttggcaggaagatgatgactgcagaattgcatttgcatataccgtatacctgtgcaagcatgagcaaaacatgtcagctaataattctttaatgttttggtcatgcctccgtgaggtatgcttgtgtgcattctataaaagaaaaacgcaagaatgaaagaaagaaatattttcaatgtaagttgatgtttcttcctgacggcttcttacttggattgtctacattaattgtttcaaggaaatacaaggatctcccctctccaaaaaaaaaa

SEQ ID NO: 10 - DNA, 3745 bp, Lolium perenne
gctccgatcccccacccacctcccaatttccccaagccgcatcgcatcacctcgtctcccgagagcaccgcgatggcggggaacgactggatcaacagctacctggaggccatcctcgacgcgggcggcaccgcgggggacatctcggccgcctctgtggccggaggcgatgatgggccgggcgctggcggaggcactgcgggggagaagcgggacaagtcgtcactcatgctccgagagcgcggccggttcaaccccgcgcgctacttcgtcgaggaggtcatctccggattcgacgagacggacctctacaagacctgggtccgcacgtcggccatgagaagcccgcaagagaggaatacgcggctggagaacatgtcctggaggatctggaacctcgctaggaagaagaagcagattgaaggtgaggaagcctcccgtttatcaaagaaacgtcttgaacgtgagaaggctcgtcgagatgctgctgctgatttgtctgaggacctatctgagggagaaaaaggagaaaacattaacggatcatctgttcacgatgagagcacaaggggacgaatgccaaggataggttcaactgatgctattgaggtgtgggcaaatcagcacaaagataaaaaactgtacatagtgctaataagtattcatggtcttatacgtggtgagaatatggagcttgggcgtgattcagatacaggcggtcaggtcaaatatgttgtagagcttgctagggcattaggtgaaacacctggagtatacagagtggatctgctgacaaggcagatttctgcacctgatgttgactggagttacggagaacctacagagatgctgagtccaagaaattctgagaaccttggggatgacatgggtgaaagcagtggtgcttatattgttaggataccttttggaccaagagaaaagtatatacctaaagagcagctctggccccacatacaggaatttgttgatggtgcacttgtccatatcatgcagatgtccaaggttcttggtgaacaagttggtcgtgaacggcgagtatggcctgttgttatccacggacactatgctgatgcaggcgattctgctgctctattatctggggcactcaatgtcccaatggtattcacaggtcattctcttggcagagacaaattagagcaacttttgaagcaaggacgtcaaaccagggacgaagtaaatgcaacatacaagataatgcgtcggattgaagctgaggaactttgtcttgatgcatctgaaattgtaattacaagcactaggcaagaaatagagaaacaatggggattgtacaatggatttgatgtaactatggagaggaaacttagagcaagaacaaagcgtggtgtcagctgctatggtcgttacatgcctcgtatgattgcgattcctcctggcatggagtttagccatattgtgcctcatgatgttgacctggatggtgatgaagcaaatgaagttggctcaggttcaccggatccacctatttgggctgatataatgcgtttcttctcaaaccctcgtaagcccatgattctcgctcttgctcggccagatcccaagaagaacatcactacattggtgaaggcatttggtgaacaccctggattgagaaatttagcaaaccttacactgatcatgggtaaccgtgatgttattgatgaaatgtcaagcacaaatggagctgttttgacctcagtactcaagttaattgacaaatatgatctatatggccaagtggcataccccaagcaccataagcaatctgaagttccagatatttatcgtttggcggcaagaacaaagggggtttttattaattgtgcttatattgaaccatttgggctcaccttgatcgaggctgctgcttatggtctaccgatggttgctacccaaaatggtgggcctgtcgacatacaccgggttcttgacaatggtatccttgttgatccacacaaccaaaatgatattgctgaggcactttataagcttgtttctgataagcacttgtgggcacaatgccgtcagaatggtctggataatatccatcgattttcttggcctgaacattgcaagaactatttgtcacgggttggcacggtgaagcctagacatccacgatggcaaaggagtgatgatgctactgaagtttctgaatcagattcacctggcgattctttgagggatgttcatgatatatctcttaacttgaagctttccttggacagtgaaaaagcaggcaccaagataaatactgaacgaaattccaccaatgccagaagaaatcttgaggatgctgtactaaaattttcaaatgctgttagtgagggcacaaaggatgagtctgatgagaatgctgaggccaccacaggctccataaatggccatctttacggagagaaacacattgttgttattgctgtagattctgtgcaaaatgctgacttggttcagattatcaaaaacctttttgaggcttcacgcaaagaaaaatcatctggtgctgttggttttgtactgtcgacatctcgagcaatatcagagacacttacttttttaacatctgggggcatacaaactactgaatttgatgccttcatatgcagcagtggcagtgatctttgttatccatcttcaagttcggaagacatgcttagccctaccgagcttccatttatgattgatcttgattatcactctcagattgaataccgttggggaggggaaggtttaaggaagacactaattcgttgggcagcagaaaacaacagtcagagtggacaagaagtagttactgaagatgaagaatgttcatccacttactgcatttcatttaaagtgaagaatactgaggctgtccctcctgtgaaggatcttagaaaaacaatgagaattcaagcactgcggtgtcatgtattgtacagccatgatggtagcaagttgaatcttatacctcttctagcatcacgatcccaagcactaaggtacttgtatatacgatggggggtagagctggcaaacatgacagtggttgttggtgaaagtggtgatacagattatgaagggctacttggaggcgtgcacaagaccatcatactcaaaggctcatttaatgctgctccaaaccagcttcatgctgccagaagctattcactggaggatgtcatatcgtttgacaaaccaggaattgcttcagtcgagggatatctcccagatagcttaaaatcagctctacaacagttcggtgtgctgaactaaagtgacaatcttgccatcagcagaacagttaagtagagtatctattctatgtggtccagatcgagaaatgtgcagcaaggcttgtcttcgctgttttaccacgtcttgcatggcagaataagttctggttgaggtttaccttctacaactcttcttgtaaaccaaaagaatttggagctacgaacttggatcagttttttgtccaaggcaaaactcaaggcaataatactgtgccctaccatcagtcacaataaagcaagattgaacatccttcttgagattcgttaatgttttgtaagactagtcatagtggggagtaatttatatgttgtttcatgcattgtattatttattatcttgtaaacccattttgttttggtgtgtgtgatgttattatggtaacatagctagttacccccctattatatttcttcactcaaaaaaaaaa

SEQ ID NO: 11 - DNA, 3735 bp, Lolium perenne
gcgcccgtgcgcacacgtatatagcccgatcaatatcaagttgggatctttagcgccggaggagcggagtagcctgctcgccggcgagggtaattagagcaagaggagtctgctcgccgtcaacaaagatggcggcggggaacgagtggatcaacgggtacctagaggcgatcctggacgcggggtcgaagctgcggccgcagggcgtgcagctgccgccgctggagacagcgccggcgctcgcggccgaggagagcagcgccgcctacaacccgaccaggtacttcgtggaggaggtggtcaggagcttcgacgagcaggccctccacaagacatggacaaaggtggttgcgatgcggaacagccaggagcggagcaaccggctggagaacctgtgctggaggatctggaacgtctccaggcagaagaagcaggtggagtgggattacacgaaagaggtggctcggcggaagcttgagcaggagctgggcagccgggaggccgccgaggacctatccgagctctccgagggcgagaaggacaccaccaccgccaagcccgacgccgcagccgctcaaccgtccgccgacgatggcgagcaccagcagccgcagccacgcacccggctcgcgaggatcaactccgaggtgcggctcgtctccgacgacgaggaggagcagaccaagaagaggaacctctacatcgtcctcatcagcatccatgggctggtgcgcggggagaacatggagctcggccgagactccgacaccggtggccaggtgaagtacgtggtggagctggcgcgtgcgctggcggcgacggcgggggtgcaccgggtggacctgctgacgcggcagatctcctgcccggacgtggactggacctacggcgagcccgtggagatgctggagcgcctgtcgtcggcggacgccgacgacgacgacggcgagcaggccggcggcggtgcctacatcgtgcggctgccgtgcgggccaagggaccagtacatccccaaggaggagctgtggccgcacatccccgagttcgtggaccgcgcgctctcgcacgtcaccgaggtcgcccgcgcgctcggcgagcagctccagcctcctccttctccggccgacggcgcggtggcggcgcccatctggccgtacgtgatccacggccactacgcggacgcggcggaggtggcggcgaacctggcgagcgcgctgaacgtgcccatggtcatgacgggccactcgctggggcgcaacaagctggagcagctgctcaagctcggccgcatgccgggccccgagatccagggcacctacaagatcgcgcgccggatcgaggccgaggagacggggctcgacaccgcggagatggtggtcaccagcaccaagcaggagatcgaggagcagtggggactctacgacggcttcgacctcatggtggagcgcaagctccgggtaaggcagcgccgcggcgtcagcagcctcggacggtacatgccgcgcatggcggtcatcccgcccggcatggacttcagcttcgtcgagacacaggacacggctgacgggacgggccgatctcagatgctcattgctcccgacaaggccaagaaggctctgcctcccatttggtcagacgtgctgcggttcttcacgaacccgcacaagccgatgatcctggcgctgtcgcggccggacccaaagaagaatgtcaccacgctgctcaaggcctacggcgagagccgccagctccgggagctcgcgaacctgacactgatactggggaacagggatgacatcgaggacatggccggtggcggcggcgcggtgctcacggccgtgctcaagctcatcgaccgatacgacctctacggccaggtggcctacccaaagcaccacaagcagacggacgtgcctcacatctaccgcctcgccgccaagaccaagggagtattcatcaacccagctcttgtggagccgttcggcctcacaatcatcgaggctgctgcttatggtttgccggtggtggcgaccaagaacggcgggccggtggacatcctgaaggcgctccacaacgggctgctggtggacccgcactcggcggaagcgatcaccggcgcgctgctgagcctgctggctgagaagtcgcggtgggtggagtgccgccgcaacggcctccgcaacatccaccgcttctcgtggccgcaccactgccgcctctacctctcccacgtctccacctactgcgaccagccctcgccgcaccagccgctccgcgtgcccctcgccctgggctcctccaccagcttcggcgccgacgactcgctctcggactcgctccgcggcctctcgctccagatatccgtggacgcctccagcgacctcaacgccgcggactccgcggccgccatcatggacgcgctccgccggcgcccggcatccgagaagccggcgagctccggtgccagggcgctcggcttcgcgcccggccggcgggagagcctcctggtggtggccgtcgactgctacggcgacgacggcaagcccgacgtcgagcagctgaagaaggccatcgacgcggcggtgtcggttggtgaatgcgcgggagcgaagcaggggtacgtgctgtcgaccggcatgaccatccccgaggccgcggaggcgatcaaggcatgcggcgccgacgttgccagcttcgacgcgctgatatgcagcagcggggccgagctatgctacccgtggaagaagctcgtggccgacgaggagtactccgggcacgtcgcgttccggtggcccggtgaccacgtgaaatccgccgtgcccaggctcgggagcatggaggagatcgccctcgcaatcgatcggcccgcctcctccgtgcactgccacgcctacgccgccacggacgcatccaaggtaagcataacagagcactacttgtagtaaccactaaccagcacggtacatggtctcctccatgcctaagcttctgatgcgtggggttttgggcaggtgaagaaggtggattcgatcaggcaggcgctgcggatgcgcggcttccggtgcaacctcgtctacacgcgcgcctgcacgcgcctcaacgtcatccccctctccgcttcccggccgcgcgctctcaggtacctgtcgatacagtgggggatcgatctctccaaggtggcggtgctcgtcggcgagaccggcgacaccgaccgcgagaggctcctcccgggagtgcacaggacgctcatcctgccggggatggtcgcccgcggcagcgaggagctcctccgaggcgacgacgggtacaccatggcggacgtcgtggccatggactcccccaacattgtcacgctcgcggaaggccagtctgcatccgacatcctcaaggccatctgagagcatgctctgctccttgtgctgcctctgttttccacatcccggacgcagtagctccacttcgattatttcacctgtgattttggcaggaagatgactgcagaattgcatttgcatataccgtatacctgtgcaagcatgagcaaaacatgtcagctaataattcttttatgttttggccatgcctccgtgaggtatgcttgtgtacatactataaaggaacagagagagaaacgcaagaatgaaagagagaaatattttcaatgtaagttgatgtttcttcctgacggcttcttacaatggcttgtctacattaattgtctcaagaaaaaaaaaa

SEQ ID NO: 12 - DNA, 2716 bp, Lolium perenne
gcttctcccctcacacgcctcgccatttgttttgtgtcctgagccatggctgccaagctgactcgcctccacagtctccgggagcgccttggtgccaccttctcctcccatcctaacgagctcattgccctcttttcaaagtatgttcaccagggcaaaggaatgcttcagcgccaccagctgctcactgagtttgaagccttgtttgaggctgacaaggagagatatgcaccctttgaagacattctccgtgctgctcaggaagcaattgtgctgcccccatgggttgcactggccatcaggcctaggcctggtgtctgggactacatacgggtgaatgttagcgagttggctgttgaggagctgacagtttccgagtacctggcattcaaggaacagcttgttgatgagcacgccagcagcaagtttgtgcttgagcttgattttgagcctttcaatgcctccttcccacgtccttccatgtccaagtccattggaaatggggtgcagttccttaaccgtcacctgtcttccaagctgttccaggacaaggagagcctctacccactactgaacttcctgaaagcccataaccaccagggcacgacaatgatgctaaacgaccgaattcagagccttcgtgggctccaatcagcccttagaaaggcagaagagtatctaacgagcattcctgaagacaccccgtcctctgagttcaaccacaggttccaagagcttggcttggagaagggttggggcgacaccgctaagcgtgtacaggacaccatccacttgcttcttgatctacttgaggcccctgatccagccagcttggagaagttccttggaactataccaatgatgttcaatgttgttatcctgtctccacacggatattttgctcaatccaatgtgttgggataccctgatactggtggccaggttgtgtacatcttggatcaagtccgtgctttggagaatgagatgcttctgaggattaagcagcaaggccttgacataacccctaagatcctcattgtcaccaggctgttgcctgatgctgttggaactacatgtggccagcggctggagaaagttattgggactgagcacactgacattctccgtgttccattcagaactgagaaggggatcctccgtaagtggatctctcgttttgatgtctggccatacctggagacatacaccgaggatgttgcaaacgaactcatgagagaaatgcagaccaagcctgatctcattattggcaactacagtgacggtaaccttgtcgccactctgcttgcgcataagttgggagttacccagtgcaccattgcccatgctttggagaaaacaaaataccccaactcagacatatatttggacaaattcgacagccaataccatttctcatgccagttcactgctgaccttattgccatgaatcacactgatttcatcatcaccagcacattccaggaaattgctggaagcaaggacagcgtgggccagtatgagtctcacattgctttcaccctccctgatctctaccgtgttgtccatgggattgacgtgttcgatcccaagttcaacattgtctctcctggagcagatatgactgtctacttcccatacactgaaactgacaagaggcttactgccttccaccctgaaattgaagagctcctttacagtgatgttgagaactctgaacacaagtttgtattgaaggacaagaacaagcctatcatcttctcaatggctcgtcttgaccgtgtgaagaacatgacaggcttggttgagatgtttggtaagaatgctcatctgaaggatttggcaaaccttgtgattgtcgctggtgaccatggcaaggagtccaaggatagggaggagcaggctgagttcaaaaggatgtacagtctcattgaggagtacaagctggagggccatatccggtggatctcagctcagatgaaccgtgttcgcaatgcagagttgtaccgctacatttgtgacaccaagggcgcatttgttcagcctgcattctatgaagcatttggcctgactgttgtcgaggccatgacatgtggtttgcccacaatagcgacatgccatggtggcccagctgaaatcattgtgaatggtgtgtctggtttgcacatcgatccttaccacagtgacaaggctgcagatatcctggtcaacttctttgagaaatccacggcagatccaacctactgggacaaaatgtcggaaggtggcctgaagagaatttatgagaagtacacctggaagctgtactcagagaggctgatgaccctgactggtgtatatggtttctggaagtatgtgagcaaccttgagaggcgtgagactcgccgttaccttgagatgttctacgctctgaagtaccgcagcctggctgctgcagttccattggccgtcgatggcgagaacacggacaattagtgcgggacatgaagaggcgccttcaaagggcgaggtgtcggctgcgttatgatttgattgtctaccggagttttcatttggtctattgtggagtgtgtacttggatgtctcaggcacttctgtgaggttttgggcagttctttgctggttcctgctagctgcatatgttgtcttcaataaacgcctgcccgtattgttcatctcttataattcaatgcaatcttctgttgcctaaaaaaaaaaa

SEQ ID NO: 13 - DNA, 2754 bp, Festuca arundinacea
gctggggttttgttgctcctgtctatttattatcccctctggatcttgagaaaccctccgccgtttggcttctcccctcgcccccttcaccatttgttttgtgtcctgagccatggctgccaagctgactcgtctccacagtctccgggagcgccttggtgccaccttctcctcccatcccaacgagctcattgccctcttttccaagtatgttcaccagggcaaaggaatgcttcagcgccaccagctgctcactgagtttgaagcattgtttgagtctgacaaggagaggtatgcaccttttcaagacattctccgtgctgcccaggaagcaattgtgcttcccccatgggttgcacttgccatcaggcccaggcctggtgtctgggactacataagggtgaatgttagcgagttggccgttgaggagctgacagtttccgagtacctagcattcaaggagcagcttgttgatgagcacgccagcagcaagtttgtgcttgagcttgattttgagcctttcaatgcctccttcccacgtccttccatgtccaagtccattggaaatggggtgcagttccttaaccgtcacctgtcttccaagctgttccaggacaaggagagcctctacccactactgaacttcctgaaagcccataaccacaagggcacgacaatgatgctaaacgacagaattacgagccttcgtgggctccaatcagcccttagaaaggcagaagagtatctaacaagcatccttgaagacaccccgtcctttgagttcaaccacaggttccaagagcttggcttggagaagggttggggtgacaccgctaagcgtgtacaggacaccatccacttgcttcttgatctgcttgaggcccctgatccagccagcttggagaagttccttggaactataccgatgatgttcaatgtcgttatcctgtctccacacggatattttgctcaatccaatgtgttgggataccctgataccggtggccaggttgtgtacatcttggatcaagtccgtgctttggagaatgagatgcttctgaggattaagcagcaaggccttgacataacccctaagatcctcattgtcaccaggttgttgcctgatgctgttggaactacatgtggccagcggctggagaaggttattgggactgagcacactgacattcttcgtgttccattcagaactgaaaaggggatcctccgtaagtggatatctcgttttgatgtctggccatacctggagacatacaccgaggatgttgcaaacgaactcatgagagaaatgcagaccaagcctgatctcattattggcaactacagtgacggtaaccttgtcgccactctgctcgcgcataagttgggagttacccagtgcactattgcccatgctttggagaaaaccaaataccccaactcagacatatatttggacaaattcgacagccaataccatttctcatgccagttcactgctgaccttattgccatgaatcacactgatttcatcatcaccagcacattccaggaaattgctggaagcaaggacagcgtgggccagtatgagtctcacattgctttcaccctccctgatctctaccgtgttgtccatgggattgacgtgttcgatcccaagttcaacattgtctctcctggagcagatatgagcgtctacttcccatacactgaaactgacaagaggcttactgccttccaccctgaaattgaagagctcctttacagcgatgttgagaactctgaacacaagtttgtattgaaggacaagaacaagccgatcatcttctcaatggctcgccttgaccgtgtgaagaacatgacaggcttggttgagatgttcggtaagaatgctcatctgaaggatttggcaaaccttgtgattgtcgctggtgaccatggcaaggagtccaaggatagggaggagcaggctgagttcaaaaggatgtacagtctcattgaggagtacaagctgaagggccatatccggtggatctcagctcagatgaaccgtgttcgcaatgcggagttgtaccgctacatctgtgacaccaagggcgcatttgttcagcccgcgttctatgaagcatttggcctgactgttatcgaggccatgacatgtggtttgccgacaatagcgacatgccatggtggcccagctgaaatcattgtggatggtgtgtctggtttgcacatcgatccttaccacagtgacaaggctgcagatatcctggtcaacttctttgagaaatccacggcggatccaacctactgggacaaaatgtcggaaggaggcctgaagagaatttatgagaagtacacctggaagctgtactcagagaggctgatgaccctgactggtgtatatggtttctggaagtacgtgagcaaccttgagaggcgtgagactcgccgttaccttgagatgttctacgctctgaagtaccgcagcctggcagctgcagttccattggctgtcgacggcgagaacaccgacagttagtgcagaggcgcctttcgcgggcaaagtattggctgcgttatgatttgtctaccgtagtttccatttggtctattatggggtgtgtaccttgatgttggggtgtgtaccttgatgtttggcactttcctgaggtttctgggcagtgctttgctggttcctgctagctgcatatgttgccttcaataaacgcctgcccatattgttcaaaaaaaaaa

SEQ ID NO: 14 - DNA, 2950 bp, Lolium perenne
ttcttcctcgtggtgcgttgcgtttgtcgggttcttctgaagaagcggaaggtttgagcaatgggggaagccgccggcgaccgtgtgctgagccgcctccacagcgtcagggagcgaatcggcgactccctctccgcccaccccaatgagctcgtcgccgtcttcaccaggctggtcaaccttggaaagggaatgctgcagccccaccagatcatcgctgagtacaacactgcaatccctgaagcagagcgcgagaagctcaaggacggcgccttcgaggatgtactgagggcagcgcaggaggcaatcgtcatctccccatgggttgcacttgccatccgccctaggcctggtgtctgggagtatgtgagagtcaacgtgagcgagcttgctgtcgaggagttgagtgtccctgagtacttgcagttcaaggaacagcttgtggaaggaagcaacaaagacttcgtgcttgagctggactttgagccattcaatgcctccttccctcgtccttccctgtcgaagtccattggcaacggtgtgcagttcctcaataggcacctgtcatcaaagctcttccatgacaaggagagcatgtaccctttgctcaacttcctccgtgcacacaactacaagggcatgcctatgatgatgaacgacagagtccgcagtctaagtgctctccagggagctctgaggaaggccgaggagcatctgtctggtcttccagcagacaccccgtactcggacttccaccacaggttccaagaacttggtttggaaaagggctggggtgattgtgccaagcgtgcgcaagagacccttcacctgctcctcgaccttcttgaggcacctgacccgtccacacttgagaagttccttggtacaatcccaatggtgttcaatgttgtcatcctctctccacatggttactttgcacaagccaatgtcttggggtaccctgacaccggagggcaggttgtctacattttggatcaagtccgtgctatggagaatgagatgcttttgaggatcaagcagcaaggactcgatatcacaccacggatccttattgttaccaggcttctccctgatgcaaccggtacgacctgcggtcagcgtcttgagaaggtcctcggtactgagcacacccacatccttcgtgtgccattcagaactgaaaatggaattgttcgcaaatggatctcacgttttgaagtctggccatacctggagactttcactgatgatgtggcgcacgagatttctggagagctccaggccaaccctgacctgatcatcggaaattacagtgatggaaaccttgttgcatgtttgcttgcacacaagatgggcgttactcattgtaccattgcgcatgcgcttgagaaaaccaagtaccccaactctgacctgtactggaagaagtttgaggatcactaccacttctcatgccagttcaccactgacttgattgcaatgaaccacgcggacttcatcatcacaagtaccttccaagagattgctggaaacaaggacaccgttggtcagtacgagtctcacatggcattcacgatgcctggaatgtaccgtgttgtccacggtatcgatgtttttgaccccaagtttaacatagtttcgcctggtgcggacatgtccatctacttcccgtactcagagtcacaaaggaggctcacctcactccacccagagattgaggagctgctctacagtgatgtcgacaacgatgagcacagttgtctgaaggacaggaacaagccaatcatcttctcgatggctcgtctggaccgtgtcaagaacttgactggtctggttgagctgtatggccggaaccctcgcttgcaggagcttgttaaccttgtggttgtttgtggtgaccatggcaacccatcaaaggacaaggaggagcaggctgagttcaaaaagatgtttgaccttattgaacagtacaacctgaatggccatatccgctggatctctgctcagatgaaccgtgtccgtaatgctgagctctatcgctacatctgcgacaccaagggtgcttttgtgcagcctgcattctatgaggctttcgggctaactgtcatcgaggccatgacctgtggtcttccaacatttgcaactgcatatggtggtccagctgagatcatcgtgaacggtgtctccggctaccacattgatccttaccagggtgacaaggcctcggctctgctcgttgagttctttgagaagtgccagggagaccacagccactggaccaagatctcactgggagggcttcagcgtattgaggagaaatacacctggaagctttactctgagaggctgatgaccctcaccggtgtctatggcttctggaagtacgtctccaaccttgagaggcgtgagacccgccgctacctggaaatgctgtacgcgctcaagtaccgcaccatggccagcactgttccattggctgtcgagggggagccctcgagcaagtgatctggccacctatcggccggaagaagaagaagaaggttggcttcgatttctgaaagatttgagatttgagaatgcgttggttttcttcctaggcgctgctcttttagagttaaggtcgagttgatgtgctagtttgattcagcagtgggagtgagttgagacagaaggatgtggtgtgtgccagtattgttggtgcttttcgtgttctttggatgttacccttgaataatagtagcggccttggcgccgtttctgaaataatagtagcatccttgctcgttgccaagaaaatcttagtttttttttctcttgaacaagtggcaaagcgacctctgcatctatctctgtcattgacatttagctctgttgcggtgcactggataccttacattgctctagagaacagcaataaaagccggaccatgtgattgctgtaaaaaaaaaa

SEQ ID NO: 15 - DNA, 2825 bp, Festuca arundinacea
gcgcgtttcccctacctgtgacgttcccgtgtttccccttccgggcgctctcgcctccttcttcctcagagcaaggtttgaggatccgactggaggatagcaatgggggagagtgcaggagagcgtgctctgagccgtctccacagcgtaagggagcgtatcggcgattccctctcagcgcacaccaatgagctcgtcgccgtcttctcaaggcttgttaaccatggaaagggaatgcttcagccccaccagatcactgctgagtacaatgctgctattcccgaggctgagcgagagaagctgaaggataccgcctttgaggatctcctaaggggggcacaggaggcaattgtcatccctccatgggttgctctcgccatccggccaaggcctggcgtctgggagtatgtgagggtcaatgtgagcgagctcggcgttgaggagttgagtgtccctgagtatttgcaattcaaggaacaattggtgaatgaaagcactgataacaactttgtgcttgagctggactttgggccattcaatgcctccttccctcggccatcgctgtcgaagtctattggcaatggtgtgcagttcttgaacaggcacctgtcatcaaagctgttccatgacaaggagagcatgtaccccttgctcaacttcctccgtgcacacaactacaaggggatgaccatgatgttgaacgacagaattcgcagtctcagtgccctccaagatgcactcaggaaggcagagaagcatctgtcaggccttccagctgacaccccgtactcagagttccaccaccggttccaggaacttggtttggagaaaggttggggcgactgtactcagcgtgcacacgagactattcaccttctcttggaccttctcgaggcccctgatccatccaccttggaaaagtttctcggaacaatcccaatggtgttcaatgttgtcatcctctctcctcatggttactttgctcaggccaatgtcttggggtacccagacactggtgggcaggttgtctacattttggaccaagtccgtgctatggagaatgagatgctattgagaatcaagcagcaaggtcttgacattacaccaaagattctaatagtcaccaggttgctccctgatgcacacggcaccacctgcggccagcgccttgagaaggtccttggcactgagcacacccacattctgcgtgtgccattcaaaacagaagatgggattgttcgcaaatggatctcacgttttgaagtctggccttacctggaagcttacaccgatgatgtggcacatgagattgctggagagctgcaggccaaccctgacttgatcattggaaactacagtgatggaaaccttgtcgcgtgtttgttggcacacaagttgggggttactcattgtaccattgctcatgccctagagaaaaccaagtaccccaactctgacctttactggaagaaatttgaggatcactaccacttttcctgccagttcacagctgacctgattgcaatgaaccatgctgacttcatcatcaccagtaccttccaagagattgctggaaacaaggatactgtagggcagtatgagtcgcacatggcattcacaatgcctggcctctatcgtgttgtccatggtattgatgtcttcgaccccaagttcaacatcgtctcccctggtgctgacatgaccatctacttcccatacactgaacaacagaagaggcttacctccctccatgctgagattgaggagctactcttcagtgatgtcgagaattctgagcacaaatttgtgctgaaggacaagaacaagccaatcatcttctcgatggctaggctggaccgtgtcaagaatatgactggcctggttgaactgtatggccggaacccacgcctacaggagctggtaaaccttgtggttgtctgtggagaccatggaaaagagtccaaggacaaggaggagcaggccgagttcaagaggatgtttgatcttatcgagcagtacaacttgagcagccacatccgctggatctctgctcagatgaaccgtgtacgcaacggtgagctctaccgctacatctgcgacatgaagggagcctttgtgcagcctgctttctatgaggccttcgggcttaccgtgatagaggccatgacatgtggcctccccacattcgccactgcatacggtggtccagctgagatcattgtgaatggcgtgtctggctaccacatcgatccataccagaatgacaaggcctctgcgctgctcgtggagttctttgagaagtgccaggaagacccaagccactggaacaagatctcgcagggcggactccagcgcatcgaggagaagtacacctggaagctgtactctgagaggctgatgaccctctctggtgtctatggtttctggaagtacgtctccaaccttgacaggcgtgagactcgtcgctaccttgagatgctctacgctctcaagtaccgcaaaatggctaccaccgttccattggctattgaaggcgagaccacaggcaaatgatttggcctcatcgaagaaataaaagggcggaccagcgccccactttcccattcctgattcagcattgaagcacagatcggagagttttatgcctttgcttttcctaggttgtagtttgagggaagttggttcccgtgagagtctctgtgttgtctgtggtagaggaactggatgtgagggatgtactcagtgctccggttggtactttttcatggatgctatgatttgaatgaataataagataagtctttgtttaccccccaaaaaaaaaa

SEQ ID NO: 16 - DNA, 1599 bp, Festuca arundinacea
gctggatcatacttgaacccgcaatagaaccggatacaccaggtgacataaaaggttgctggtccgcctcagccacagttatatctggtagtcaaccggtcatcatgtacaccggtggcgatgtagagaatcatcaggttcaaaacattgcgcttcctaagaaccggtctgacccgtaccttatagaatggaccaaggcatgcaataacccagtgctccaaccggttggaccaggaatgaacccaggcgagttcagggatccgacgacaggttggatcgggccggatggactatggagaatatcaattggagctgaggtgaacggttacagtgcagcacttttgtacaagagtgaagactttctgaattggagtagagttgatcacccactgtattcatccagtgcctccactatgtgggagtgcctggacttcttcgcggtattaccgggcagtaacggtggactggacctgtccgcagctattccgaaaggcgccaaacatgtcctcaaagtcagcgtggatcaatgtgacaagtacatgattggggtttatgatctcgaacatgatgcttttgtgcctgatactatcctcgatgaccgttggttgttgccgaggatcgattacggcaattactatgcttcaaaatcgttcttcgactcgaaaaataggaggaggatcatatggggttggactaatgagtcagatagttcttcagatgatgtcgcaaaaggctgggcaggtatctatgcaattcccaggacaatttggctagaccgtgatggcaagcagttgctgcaatggccagttgaagagattgagtcccttcgaagaaatgaaatcaactatcaaggactagatctggagaagggagatctttatgagattaagggagttgacactttgcaggctgatgtggagatagattttgagctgacgtctattgatgatgccgactcttttgatccttcctggcttttggatcccgaaaagcattgccgggaagcgggtgcatcagttcatggtggtatagggccatttggacttgttattctggccaccggcgacatggaggagcacactgttgtgcacttcagagtctacaaatcacagaaagaatacatgatactcatgtgctctgatataagaaggtcttccctgagacaaggactgtacgcacctgcctatggaggcttctttgaatttgatcttgaaaaggaaaggaagatatctctgagaactctaattgatcggtcggcggtggagagctttgggggcggtggcagggtctgtatcatagctagagtttatccagtggcgattgtcgatgacgggagtgcccacatgtatgccttcaacaatggaagtaccacggtcagggtgccacagatcagggcatggagcatgatgacagcacaagtgaatttaaagaaaggctgaagtgatgattaacacagaaaagctaattccttttattgattctttctcttattcatgagcactcattcgtacaaataaacggaaattcaacaggcatatgtaattgattgtttccttgatctcaattattcatatactataattattattaaaaaaaaaa

SEQ ID NO: 17 - DNA, 2010 bp, Lolium perenne
gctcgtcttcccctattaactgcgcatggggaatccgaaatgggtcctggcgccatgggcggtgctgcttctcctgcagctcgcctccgcatctcaccatgcccgcctgagcctggagacctcggccgcgtcgccgtcggtcccagcctccattgttagcccgctgctcaggacaggctaccacttccagccccccatgaactggatcaacgatccaaatgggccgttgtactacaagggatggtatcacctgttctaccagtacaaccccaagggcgcggtgtggggcaacatcatctgggcgcactcggtgtcccgcgacctgatcaactggatcgcccttgagccggcgatctcgccgaccatcccgacggaccagtacggcgtgtggtccggttcgacgacgatcctccacgacggcactccggcgatcctgtacacggggatcgaccggccgagcgtcaactaccagatccagaacatcgccctgcccaagaacgcgtcggaccctctcctccgggaatggtacaagccggggtacaacccgatcgcggtgccggtggaaggtataaacgcgacgcagttccgcgacccgaccaccgcgtggttcgccggcaggcactggcggatgctcgtcggcgggctgaggccgggcacgctccgcggggaggcgattctgtaccggagccgcgacttcaagcactgggtccgcgccaagcacccgctgcactcggcgctcaccggcatgtgggagtgcccggacttcttcccggtgggcaaggccggggtggagaagggcctggacacctccgagtacggcgcggcggcgggcgtggagaagcacgtgctgaagaacagcctcgacctcacccgctacgactactacaccatcggcacgtacgacaacgtcaaggagcggtacgtgccggacaaccccaccggcgacgtctaccagcgcctccagtacgactacggcaacttctacgcgtccaagaccttcttcgaccccgtgaagcagcgccggatcctcctggggtgggccaacgagtccgatagcgtggcccacgacaaggccaagggctgggccgggatccaggcgattcccaggaagatatggcttgaccccagcggcaagcagctggtgcagtggccggtggaggagctcgagaagctccggggcaagcctgtcaacgttggcgacaaggtcgtcaagcccggccagcattttgaggtcacgggcctgcagtcataccagtctgacgtggaggtgagcttcgaggtatcgagcctggataaggctgagcccttcgatccggcctacagcaacgacgcgcagaagctctgcggcatcaagggcgccgatgtcaagggcggggtggggccttttgggctttgggtgctgtcctctgccgacctagcagagaagactgcagtgttcttcagagtcttcaaggatggatacggcaaacctatcgtcctcatgtgcagcgaccccaccaagtcatctcttaccccagatctatacaagccgactttcgccgggttcgtcgacaccgacatttcgtccgggaagatctctctgagaagcttgatcgatcggtcggtggttgagagcttcggcgcgggagggaagacctgcatcctatcaagggtgtacccgtctatggccctagggaaagacgcgcaccttcacgtgttcaacaacggggagacggatatcaaggtgtccaagctgaccgcgtgggagatgaagagaccattgatgaatggcgcctaagcatgcaccatctccgacgagttttcgcttcctcgcatttcgtggtttcacttcactgatattcagtgcctcgattgctcactcaagagctctatgatcacatatgattgcaaattttgttgcaaaattcatgggttgggtaccgtggtgtacgtacaaataaagatattgtttaatttccacacgtctaaatataataatgaagagctagcttcatattttctaaaaaaaaa

SEQ ID NO: 18 - DNA, 1389 bp, Lolium perenne
gggcgtggggtccctgctggtgtaccggagcgcggacttcctccgctggcagcgcaacgccgcgccgctgcacgccagctcgcgggacgtgcccgtgctggagtgcccggacctgttcccggtggctgcggcggcgcagggcgcgacggaggggctcgagacttcggcaccgagcggcgccggggtgaggcatgtgctcaagctcacggacttcgccaaggaggaccactacatggttgggttttacgacgacgtggcggacaccttcgtgccggcggagcccgagcgcggcgacgaccccgacaactggcgccggctcgaccacggccacctgtacgcgtccaagtccttctacgacgcgcgcaacaagcggcgcatactgtgggcgtgggtggacgagaccgacggtggcggcgtcgccaggggctgggccggcatccaggcgttcccgagggcgatgtggctggacgccgacgggaagcggctggtgcagtggcccgtggaggagatcgagacgctgcggaggaagcgggtcggcctgcggtgggcgacggacgtggaggccggcggcaggaaggagatcgccggcatcgtgagctcgcaggcggacgtggaggtcgtgttcgagatcccgaacctggaggaggccgagacgttggaccccgagtgggtgctggatccgaaagggctgtgcgcggcgaagggcgcgtccgtgcacggcggcgtcggcccgttcgggctgctcgtcttggcctccggtgacctggaggagcacactgctgtgttcttcagggtgttcaagcacgatggcaagtacaaggttctcatgtgcaccgatctcacaaagtcatctacgaaagcaggggcacacaagccatcctatggagcatttcttgatgtggacgtggagaaggacaagttcatatcgctcagaacattgatcgatcacacggtggtggagagcttcggcgacggcgggaggacgtgcatgacggctcgtgtgtaccccgaacacgcggcgatgggaagcacccacctgtacgtgttcaacaacgggacaggtgccgtaaaggtgtccaaacttgaggcgtgggagctggcgacggcggccgtgaacggcggctcgcttgcacccgtcgtcgtcaaggcatccgaccctaaagaggccttgtagttttagggtatgcccgggatggtggctgcttagatgatgtccgtcgttgatttatgcttgttggtcgagttatgagtttcgggtaggatgatttatgcggaaatgcaattttagtggcgtcatgacctattggacaaacatctgtcattggaaaaacgtggtgatatgtccacgcccatatctaaaggtataatagaggcatcccaaaaaaaaaa

SEQ ID NO: 19 - DNA, 2231 bp, Festuca arundinacea
gctgtccactgcctctcgtcccacccgctctctctgttgctaagttggttggtttgccatggcgggcctccgtctcgccgcgtgcgcggccgtcgccgtgctactctgcctcctcctctcgtcctccgccgccctccgatggctctctgaccccgcgcctgagagcgccgccgccggagtcagccacgacagctaccggaccgcctaccacttccagcccacggagaactggcagaacgatccgaatgggccgatgtattacaagggcgtctaccacttcttctaccagtacaacccgtaccgcgcgacctggggcaacggcaacctctcctggggtcactccgtctccgtcgacctcgtaaactggtccgccctcgagaacgccatggacccggactcctccttcgacatcaacggctgctggtcgggctccgccaccatactccccgacggcaccccggtcttcctctacaccggcatcgacgccgacaacaaccaggtccagaacgtggccttccccaagaacgcctccgacccgctcctccgcgagtgggtgaagcccagctacaaccccgtcatcgcgctccccgacgacgtcgtgcacgacaacttccgggacccctccacggcctggctcggccgcgacggcctctggcgcgtcgccgtctccgcagggctcaaggacggcacggggaccacgctggtctaccgcagcaaggacttccggcagtgggagcgcaacgccgagccgctctactcgtcgagcgacgccggcatggtggagtgcccggacctgttccccctggcggagcccggcgaccagcacgggctcgactacacgccctcgaacggcgcggcggtgagttatgtgctgaagcagagcgttatggacacgctcagtgactactacgtgctggggcggtacgacgacgccgcggacaccttctcgccggtggaggcggacaacgactgccggacatggcagcgcttcgactacggccacgtctacgcgtccaagtccttctacgacgcgggcaagaagcggcgcgtgctctggagctgggccaacgagtccgaccccgaggccgactacctcgccaggggctgggccggcgtgcaggccgtcccgaggaggatctggctggacagcaaggggaagcagctgctgcagtggccgatcgaggagatcgagacgttgaggaagacgcgggtcgggttgctgggagcggagatgaacgccggcggcatgaacgagatcatcggcgtcgccggcgcgcaggcggacgtggaggtggtcttcgaggtcccgtccctggagggcgccgagaacctcgaccccaaccagctgcttgacccacagaggttgtgcggcgagaagggcgcgtccgtgcttggcggcgtcggcccgttcgggctgctcgttctggcctccggcgacctccaggagcacacctccgtcttcttcagagtgttcaggcacgagggcaagtacaaggttctcatgtgcaccgacctcagaagatcgactacgagagccgacgtgtacaagccgccgtacggagggttcgtggacatcgacatcgagaaggagaggagcatatcgctcaggacactggtcgaccactcggtggtggagagctacggcggcggcggccggacggtcatcacggcgcgggtgtacccggagcacgcggcgacgaccaacagccgcctgttcatgttcaacaatggcaccggcgccgtgaaggtgtccaagctcgatgcgtgggagctggcgccggcgaaagtgaacgtcccgggcgacgggctcatcaccgctggctcctcgatgcacctacgcgaagcgtattaggaggagattgtgattagtagttcgttcggtgaatggccaattgtgtggccgattggacttccctggccaaattacggtcttttgggggttcatttggggaatttgtagcagtgtctttcaggatagtaaagtacagtagtacgtagtaagaagggtagtcgaagtctcgaagagcgttttgctgatttgggatgcatttgggagatttgtttagtactgcatgtcagcgattgtgagtagtatctgtcaggatagtatataagtagtaagaaagaagagtagtcgaagagtggttgctgattaacacatgtcagcgaacagtccgcgtcttgtttattctttgcaaaagaaatagagaaagtacatatcaaaaaaaaaa

SEQ ID NO: 20 - DNA, 1319 bp, Festuca arundinacea
cttgaactcaactgagttcagggatccgacaactggttggatcggaccggatgggctatggagaatagcaattggtgctgagctgaatggctacggtgccgcacttttgtacaagagtgaagactttctgaattggactagagttgatcacccactgtattcagacaatgccccctcaatgtgggagtgcccagatttcttcgccgtattgccaggcaataacggtggactggacctgtctgcggcgatcccgaaaggcgccaaacatgtcctcaagatgagcgtggattactctgacaagtacatgattggggtttatgatctcaaacgtgatgcctttgttccggatgttgtcctagatgaccgtcggctgtggttgaggattgattacggcacattctatgcttcaaaatccttcttcgactcgaaaaggggcaggagggtcatatggggttggtccaacgagacagatagtgtttcagatgatggtgcaaaaggttgggcaggtatccatgcaatccccaggtcaatttggttagacagcgatggcaaacagttgctgcaatggccgattgatgagattgagtcccttcgaagagatgaaatcaaccatcaaggactagagctgaagaacggagacctatttgagattaagggaattgacactttgcaggctgatattgaagtagattttgagctgacgtccatcgacagcgccgatccttttgatccttcctggcttttggatgtcgagaggcattgccgggaagcaggtgcatcggttcaaggtggcatagggccatttggacttgttgtcctggcgtctgacaacatggaggagcacattgctgtgcacttcagagtttacaaatcacagaaaagccacatgatcctcatgtgctctgatctaagaaggtcttctctgagatcaggactgtacacaccagcctatggaggcttctttgaatttgaccttgaaaaggaaaggaagatatctctcagaactctgattgatcggtcagcggtggagagctttggcggcggtggcagggtctgcataacggccaggatttatccagtggcgcttgtcgacggcagggtccacatgtatgccttcaacaatggaagtaccacggtcagggtgccacaactcggggcatggagcatgatgacagcacaagtgaacgtgaataagggttgaagtgatggttaacacagaagagcagtttcattttcttaattagcgtactctcattcaggagcactccttggtacaattgaaaggaaattcgacaggaagtagttggtcaaaaaaaaaa

SEQ ID NO: 21 - DNA, 1995 bp, Festuca arundinacea
ggtcttccactaataactgcgcaagcaatggggaatccaaaatggatcttcgcgccatgggcggtgcttctgctcttcctcctgcagctcgcctgcgcatctcaccatacccgccggagcctggagaccgaggccgcgtcgccgtcagtaccagcttccattgttagcccgctgctcaggacgggctatcacttccagccccccatgaactggatcaacgatccaaatgggccattgtactacaagggctggtaccacctgttctaccagtacaaccccaagggcgcggtgtggggcaacatcatctgggcgcactcggtgtcccgcgacctcatcaactggatcgccctggagccggcgatcacgccgagcatcccgacggacaagtacggcgtgtggtccggttcgacgacgatcctccacgacgggacgccggcgatcctgtacacggggatcgaccggccgagcatcaactaccagatccagaacatcgcgctgcccaagaacgcgtcggacccgctcctccgggaatggtacaagcctgggtacaacccgatcgccgtgccagtggccggcatgaacgcgacgcagttccgcgacccgaccaccgcgtggttcgccggcaggcactggcggatgctggtggggggcctccggccggggacgctccgcggggaggcgatcctgtaccggagcctcgacttcaagaactggacccgcgcccaccacccgctgcactcggcgctgaccggcatgtgggagtgcccggacttcttcccggtgggcgaggccggggtggagaagggcctggacacctccgagcacggtgaaggggtggagaagcacgtgctgaagaacagcctcgacctcacccgctacgactactacaccgtcggcacgtacgacaacgtcaaggagcggtacgtgccggacaaccccaccggcgacgtctaccggcgcctccagtacgactacggcaacttctacgcgtccaagaccttcttcgaccccgtgaagcagcgccggatcctcctggggtgggccaacgagtccgacagcgtggcccacgacaaggccaagggctgggccgggatccaggcgattcccaggaagatatggcttgaccccagcggcaagcagctggtgcagtggccggtggaggagctggagaagctccggggcaagcctgtcaccgtcggcgacaaggtcgtcaagcccggccagcattttgaggtcacggggctgcagtcataccagtctgacgtggaggtgagcttcgaggtgtcgagcctggataaggccgagccgttcgatccggcctacagcaacgacgcgcagaagctgtgcgggatcaagggcgccgatgccaatggcggggtggggccttttgggctcgtggtgctggcctctgccgacctggcagagaagactgcagtgttcttcagagtcttcaaggatggatacggcaaacccatcgtcctcatgtgcagcgaccccaccaagtcatctctcaccccagatctatacaagccgactttcgccgggttcgtcgacaccgacatttcatccgggaagatctccctaagaagcttgattgaccggtcggtggttgagagcttcggcgcgggagggaaaacctgcatcctgtcaagagtgtacccgtccatggccctagggaaaaatgcgcaccttcacgtgttcaacaacggggagacggatatcaaggtgtccaagctgaccgtgtgggagatgaagagacccttgatgaatggcgcctaagcatgcaccatctccgacaagttttcggtttctcgcattttgtggttttagttcactgatgttcagtgcctcgattgctcgctcaggagctctatgatcagatatgattgcaaattttgttgcaaaattcatgggttgggtaccgtggtgtgtatgtacaaataaagatgttgtttaatttccacgcttctaaatataatagtaacaaaaaaaaaa

SEQ ID NO: 22 - DNA, 1760 bp, Lolium perenne
ggatggcttggtgacctttggaattctccggcaacacaaaagatccaaatggaccaatgtactacaatggtatctaccatgagttctaccagtacaaccccaatggctccctctggggtaacataatttggggccattcagtttcgacggacctcatcaactggatcccagtagaacctgcgatagaacgggatatcccaagtgacataaacggttgctggaccggctcagccacaattatttccggtgatcaaccaattatcatatacaccggagccgacaaggagaaccgtcagctccagaacattgtgcttcccaaaaacaagtctgacccgtatctgagggagtggacaaaagcaggtaataacccggtgatccaaccagtcgggccaggcttgaatgcgagccagttcagggatccgacaaccggttggattggaccggatggactgtggaggatagcagttggtgctgagcttaatggctacggtgctgcacttttgtacaagagtcaagactttctgaattggactagagttgatcacccgctgtattcatccaatgcatcctcaatgtgggagtgcccagattttttcgcggtattgccgggaaatagtggtggacttgacctatctgcagaaatcccaaatggcgccaagcatgtcctcaaaatgagcctagattcctgtgacaagtacatgatcggagtttatgatctgaaaagtgatacctttatgccagatagtgtgttagatgaccgtcgactgtggtcgaggatcgatcatggcaatttctatgcttcaaagtcattcttcgactcgaaaaagggaaggaggatcatatggggttggacaaatgagacagatagctcttcagatgatgttgcaaaaggttgggctggaatccatgcaattcccaggacaatatggttagacagttatggcaagcagttgctgcaatggccaattgaagagatcgagtcccttcgaagaaatgaaatcagccatcaaggactagagctgaagaaaggagacctatttgagattaaaggaactgacacttcgcaggtggtccatgtttttttagggaaactgtagcttatctggcacatcattttcttgaaacaggctgatgtggaggtagattttgagctgacatccattgataatgccgacccttttgatccttcctggcttctggatgtcgagaagcagtgccgagaagcaggtgcatcggttcaaggtggcatagggccatttggacttgttgtcttggcctctgacaacatggaggagcacactgctgtacacttcagagtttacaaatcgcagcaaagctacatgatcctcatgtgttctgatctaagaaggtcttccctgagatcaggaatgtacacaccagcatatggaggcttctttgaatttgaccttcagaaggaaagaaagatatctctgagaactctgattgatcggtcagcggtggagagcttcggaggcggtggcagggtctgcatcatggccagagtttatccggtggtgcttgtcgatgatggcggggcccacatgtacgccttcaacaatggcagtaccacggtcagggtgccacagctcagggcatggagcatgagcagggcagagcacaagtgaatgtaaagttaaagtgatgattaacatagaagagcaaatctaattgacctgtgattggaggactggaaaagtgatttaaatgcttagcacaattgtttcttgataaaaaaaaaa

SEQ ID NO: 23 - DNA, 2059 bp, Festuca arundinacea
ggaaccagccacccacctggccatccatggccgggctccgtctcgccgcggtcgccttccacctctgcctcctgctctctccgtcgtcctccctccgccggctctaccacgaggacgacgaggcagagagcacgccaggccatggcgggagcaggaccgcctaccacttccaacccgccaagaactggcagaacgatccgaatgggccgatgtaccacaacggcttgtaccacttgttctaccagtacaacccacgtggcgccacctggggcaacggcaacctctcctggggccactccgtgtccgtcgacctcgtcaactgggccgccctcgacaccgcccttgaccccgactccccgttcgacgccaacggctgctggtcgggatcagccaccatcctccccgatggacaaccggccattctctacaccggcatcgacgccgctggcaaccaggtccaaaacgtcgccttccccaagaaggcatccgatccactccttcgtgagtgggtgaagcctgactacaaccccgtcattcctctccccaaggacgtcgtgcacgacagcttccgtgacccctccacggcgtggcgcggccgtgacggcctctggcgtgtggccatcgcggccaaggtcaacgtgaccgtgaccgtggggtcaacactgatctaccggagcaaggacttccggcgctgggagaggaacgccgcgccgctgtacgagtctcttgccgccggcatggtggagtgcccggacctgttcccggtggcgaagcccggtgcgcagaacgggctcgactacgcgccctcgagcagggcggcgaggcacgtgctgaagctgagcgtggtggccacgctccaggactactacgtggtggggctgtacgacgacactgcggacaccttcaatgcggccgccggcgccgacaacgactggcggacctggcgccgcatcgactacggccacgtgtacgcgtccaagtccttcttcgacgcgcgaaagaaccggcgcgtgctttggtgctgggccaacgagtctgacaccgaggccgactacatcgccaggggttggtctggcgtccagacggtcccgaggaagatctggctggacatcgatgggaagcagctgctgcagtggccgatcaaggagatagagacgctgaggaagaagcgggtcgggttgctaggaacggagatgaactctggcggcctgaacgaaatcatcggcgtcgcgggctcgcaggcggacgtggaggtcgtcttcaagatcccgaccctggagggggctgagaacattgagcccaatgagctattggacccgcaaaagctatgcggcaacaatggcgcgtcaatgcggggcagtatcggcccgttcggtctactcctcctagcctccggcgacctgctggagcacacctcagtcttcttcagggtgttcaagcacggtgccaagtacaaggttctcatgtgcaccgacctcacaagatcgactacgagatccgacgtgtacaagccgtcgtacggagggttcgtggacatggacatcgacaagaccaagagcatatcgctcagaacattgattgatcactctgtggtggagagcttcggcggtggggggcgaacgtgcatcacggcgcgggtgtacccggagcacgcggagatgagcaacagccacatctatatgttcaacaatgggacaggcgcggtgaaggtagccaagctcgaggcgtgggagctggcgacagccaacgtgaatgtcgcgggccacgggtgataaccccaagtgcaatgaatagtcgtaacacgtttcagtgtggaagtgttagtataaaactgtgggagctactaggttttattctcgaaaactatatatgccacttatataactacttaattaggatatgcttctgcaaaaaaaaatcttcaaaaattggtccaagttaaagttgggggcggtgcccccgacatacacattcctctgcatatgcttgtaacgtgggtagaaaggtcaataagtacgcgggactttgtgattctcgccataggcataaaaaaaaaaaa

SEQ ID NO: 24 - DNA, 2167 bp, Lolium perenne
gggaccttgcgcccaagtacgtagtctgcacagcaatgggggttcgtctcgggagagtagcttgggcgtgcccggcggttctggtgctgctcttgcagctcgccggagcgtcccatgtcgtctacgagaccagcctcctcgagaccgaggcggcggcggccaccgtgccagcctccatttttgagctgagcaccgggtaccacttccggcctcagaagaactggatcaacgatcccaacgcgccgctgtactacaagggttggtaccatctgttcttccagtacaaccccaagggcgcggtgtggggcaacatcgtgtgggcgcactcggtgtcgcgcgacctcatcaactgggtggccctggagacggccctggcgccgagcatcgacgccgacaaatacggctgctggtcggggtcggcgaccatcatgcccgacggcacgccggtgatcatgtacacgggcgtcagccggccggacgtcaactacgaggtccagaacgtcgccttccccaagaacagctcggaccctctcctccgggagtgggtgaagccggcgcacaacccggtgatcgtcccggagggcggcatcaacgcgacgcagttccgggacccgaccacggcctggtacgcggacgggcactggcggatcctggtgggcgccctctccggcgcgtcccgcggcgtggcgtacgtgtaccggagccgcgacttccggcggtggacgcgggtgcggaagccgctgcactcggcgccgacggggatgtgggagtgcccggacttctacccggtgaccgtggacggcaaggagagcggggtggacacgtccgtggtgtccagctcgagggtgaagcacgtgctcaagaacagcctcgacctccgccgctacgactactacaccgtcgggacctacgaccggctgaaggagaggtacgtgccggacaaccccgccggcgacaagcaccacctgaggtacgactacggcaacttctacgcgtccaagacgttctacgacccgtccaagcgccgccgcatcctgtggggatgggcgaacgagtccgacaccgccgtcgacgacgtcgccaagggctgggccggaatccaggcgattcctcggaaggtttggctggacccaagcgggaggcagctgatgcagtggccggtggaggaggtgaaggcgctcagggggaagaagccggtcagcctcaaggaccggatggtgaagcggggagaacacgtcgaggtcaccgggctacaaaccgcacaggctgacgtcgaggtgagcttcgaggtgccgagcctggagggggcggaggcgctggacccggcgctggccaacgacgcccagaagctttgcggcgtgaagggcgccgacgtggagggcggcgtggggcccttcggtctgtgggtgctggcgtcgtccaagctggaggagaggaccgccgtcttcttcagggtgttcaaggccgcgggcaacgtcaacagcaccaagcccctcgtgctcatgtgctccgatccaaccaagtcatctctgaacaagaacctgtaccacccgaccttcgcgggcttcgttgatattgacatggctaagggcaagatttctctcagaagcctgatcgatcaatccgtcgtggagagctttggggccggaggcaggacgtgcatcctctctcgcgtctacccgtcgctcgccattggcaggaacgctcacctccacgtcttcaacaacggcaaggcggacatcaaggtgtcgcggctcacggcgtgggaaatgaagaagccggcgctcatgaacggtgcctagatttagattcaggcaggagcaccatatgcatgattcctacatatgtgcttgaatttggctcaggcatgcgtctggggcgttattctgatgttaatttgacctctggtgaaacatgctagttttacaagggcgcgtacgtagctagctaggtttgcacgctgtgtaagtgaagggggtcattttgtatgcccccgggaataataaagatccatgcatagcctgaggtgggcatcggtagaaagttatttttttgaaacggggcaaaatatttgctccaatcaactactcctggcatggattaaaataaggagcaacaaagtagaagttttacaagaaagttaatgttttgattattaaaaaaaaaa

SEQ ID NO: 25 - DNA, 2138 bp, Lolium perenne
gccctcgcactagtcggccgaggcattcttcctagttgcttccatcgcatcgatctcgatccacagattctatgccaatggaggcaagagatggcgtctcgatgccctactcgtatgcggccctgccggaggacgccgaggcagcggtggttgggcgcggtcgccggaccgggcctctgttcgcagcgttgctgttgacgttggtcgccgcgctccttgccgtcgccgcgctggctggcgtcaggctcgttggcgagctgcctgccgggggcgtcgtcatgcccaaccacccgatggaagtcatggacgtcagcggtagcagagggcctgagtcaggcgtgtcggagaagacgtccggggccgccagcgagagcggcggcatgctgggcgccgacgccggcagcaacgcgttcccgtggagcaatgcgatgctccagtggcagcgcaccggcttccacttccagcccgagaagaactggatgaacgaccccaacggtccggtctactacaaggggtggtaccacctcttctaccagtacaacccggagggcgcaatctggggcaacaagatcgcgtggggccatgccgtgtcccgggacatgctccggtggcgccacctgcccatcgccatgttccccgaccagtggtacgacatcaacggcgcatggtcaggctccgccaccgtgctccccgacggccgcatcgtcatgctctacacgggctccaccaacgcctccgtgcaggtccagtgcctcgccttcccctccgacccctccgacccgctgctcaccaactggaccaagtatgagggcaacccggtgctgtacccgcctccgcacgtcggggagaaggacttccgggacccgaccactgcatggtacgatggctccgatggaatgtggcggatcgtcatcgggtccaaggataaccgccgcgccggcatggccttgacctacaagaccaagaacttccatgattttgagctcgttcccggagtgctgcaccgggtgccggcgacggggatgtgggagtgcatcgatttgtacccggttggcggcgcgaggggcattgacatgacggaggccgttgcggcggcatccaacagcggtggtggtgaagttttgcatgtcatgaaggagagctcagacgacgaccgacatgactactacgcgctagggaggtacgatgcagcgacaaacaagtggacaccgctagatgccgacgccgatgtcggcatcgggctgaggtacgattggggaaagttctacgcatccaagaccttctatgacccggccaagaagaggcgtgtgctatgggggtgggtcggcgagactgactctgagcgcgccgacgtggccaagggatgggcttccctacagtcgatccctcgcacggtggtgctagataccaagacgggcagcaaccttatccagtggccggtggtcgaggtggagacgctccgtaccaactccaccaatctcgggagcatcatcgtcgagcatggctccgtcttccctctcagtctccaccgggccacacagctcgacatcgaggcttccttccgcctggacccgctcgatgtcgccgccgcaaaggaggccgacgttggctacaactgcagcaccagcggtggcgcggccggtcgtggagcgctcggtccctttggcctgctcgtactcgccgatgccaggcgccatggcggggacacggagcagaccgccgtctacttctacgtcgcgaggggcctcgatggcaacctgcgcacgcacttctgccatgacgagtcacggtcatcccgtgccaacgacattgtcaaaagggtcgttggcaacatcgtgccagtgctcgacggaaaggcgctgtctgttagggttttggtggcccactccattgtcgagagcttcgcacagggtgggaggtcggtggtgacttcacgagtttacccgactgaggccatctacgccaatgccggggtataccttttcaacaacgccaccggtgcccgggtccccgccaccagtctcgtcgtccataaaatggacccctcctacaaccagaaccaggccgaaatggcttcattgtaaatcgaaaatgtacatattgttttttgtgctagcatgttgcccgtaaaaaaaaaa

SEQ ID NO: 26 - DNA, 1768 bp, Lolium perenne
ggtccattggcgccacctcccgctcgccatggtgcccgaccaatggtacgacatcaacggtgtctggacaggctccgccaccgtgttccccgatgggaccctgaacatgctctacacggggtccaccaatgcctccgtgcaggcccagtgcctcgccgtgcccgaggaccccaatgactccctcctccgcaactggaccaagcacgaagccaacccggtcctcctcccaccgcccgggatcggtgacaaggacttccgtgacccaaccaccgcatggttcgacgagtctgaccagacgtggcgcaccgtcatcgggtccaaggacaacaacggccacgccggcatcgccatggtgtacaagaccaaagacttcctcaactacgagctcatcccgggatacttgcatcgcgtcgacggcaccggcatgtgggagtgcatcgacttctaccccgtcggcggcaagaacggcagcgaggagctgtacgtgatcaaggagagcagcgacgacgaccgacatgactggtacacgctagggaaatacgacgcggcagccaacacgttcacggccgcggacccggagaacgacctagggattgggctgaggtacgactggggcaagttctacgcgtccaagaccttctacgacccagccaagaagcggcgcgtgctgtgggggtggattggcgagaccgactccgagcgcgccgatgtcgccaagggatgggcatccctcatgtcgattccgaggacggtggagctcgacgagaagacctggaccaacctcatccaatggccagtggaggagatcgagaccctccgcatcaagtccaccgaccttggtggcatcaccattgaccacggcagcgtctacccactccctctccaccgcgccacacagctagacatcgaggcctccttccgcctcgacgccgccaccgtcgccgccctcaacgaggctgacgtaggctacaattgcagcaccagcggcggctctacccaccgcggcgcactcggcccctttggcatcctcgtccttgccgacggtaaggcggagcaaacggcggtgtacttctatgtgtccaagggccttgacggggccctcgagacccacttctgccacgacgagtcgcgatcgacgctggccaaggatgtcgtgaagcgagtggtgggatacaccgtgcctgtcctcgatggtgaggcattttccgtgagggtgctcgtggaccactcaattgtggagagcttcgccatgggtggaaggtccacggcgacgtcgagggtgtacccgacggagtctatctacggcgctgctggtgcatatcttttcaacaatgccaccggcggctccgtgaccgttgagaagctcgtggtgcatgagatggactcgtcctacaaccagatcttcatggctgacgacttgtagtcaccgtcatccatggatagcgtcggatggtgaggatgatcacctactacatatacatacatactattgatcgaacgatccccggatcggtcggtggtggcttcctctttttttggatgcagaaggagatggagtactagctactctatttaccatgttgttgttttgttggttttttggggtttgggtttttgacgagatggatgaattagctatagatggatgattgtgtcctatttttctcctgccttccgagtgtaactacatatattggcaggatcgatgatatccctgttgcatgacagtgatgattaattattgtgatgatattgatcaaaaaaaaaa

SEQ ID NO: 27 - DNA, 1855 bp, Lolium perenne
ggatcttccggtccaggctcccggacatcgacatccctacccacatgcccctgcacgactactgcttcgcgacggcagcctcggccccggacgcgccgtgcctcattaccgcagccacggggcggacctacacgttcgccgagacgcacctgctctgccgcaaggccgcggcggcgctgcacgggctcggcgtgcgccacggggaccggatcatggtgctgctgcagaactccgtggagttcgcgctcgccttcttcggcgcgtccatgctcggggccgtcagcacggcggcgaacccgttctgcacgccgcaggagatccacaagcagctcgtggcctccggcgcgaagctggtcgtcacgcagtccgcctacgtcgacaagctccggcacgaggccttcccacgaatcggcgaggccctgaccgtgatcaccatcgacgacgacggcaccccggacggctgccagccgttctggggcctcgtgtcagccgccgacgagaacagcgtcccggagtctcccatctcgccggacgacgcggtggcgctgccctactcgtcgggcacgacggggctgcccaagggcgtggtgctgacgcacgggggcctggtgtcgagcgtggcgcagcaggtggacggcgagaacccgaacctgcacatgcgggcgggggaggacgtggtgctctgcgtgctgccgctcttccacatcttctcgctcaactcggtgctgctgtgcgcgctgcgggcgggcgccgccgtgatgctgatgcctaggttcgagatgggggccatgctggagggcatcgagcggtggcgcgtcacggtggcggccgtggtgccgccgctggtgctcgcgctcgccaagaaccccggggtggagaagcacgacctcagctccattcggatcgtgctctccggcgccgcgccgctcggcaaggagctcgaggacgcgctacgtggccgcctgccgcaggccatcttcggacagggctacgggatgacggaggccgggccggtgctgtccatgtgcccggcgttcgcgcgggagccgacgccggccaagtccggctcctgcggcacggtggtgcgcaacgccgagctcaaggtggtcgaccccgacaccggcgtctccctcggccgcaacctccccggcgagatctgcatccgcggcccgcagatcatgaaaggatacttgaatgatcccgtggccaccgccgcgaccatcgacgtcgagggatggctccacaccggcgacatcggctacgtcgacgacgacgacgaggtcttcatcgtcgaccgcgtcaaggagctcatcaagttcaagggcttccaggtaccgccggccgagctcgaggctctgctcatcgcgcacccgtccatcgccgacgcggccgtcgtcccgcaaaaggatgatgccgccggcgaggtcccggtcgccttcgtggtccgcgccgccgactccgacatcgccgaggaggccatcaaggagttcgtatccaagcaggtggtgttctacaagaggctgcacaaggtctacttcacccacgcgatccccaagtcggcgtcggggaagatactcaggaaagaactcagagctaaactcgccgccccggccactgcctgaagagtggttcaaggcttcatgctaatcatttcgatcagaaaggcagttcctatgttccaccttttgtttcatttggaagattgtattccagctagtggccagtgactgagtaagggatggggataaaagttttgtctacgttttcttttacgctactctctccattgaggagtacaatgtatcaggggattcgtgattgaaattaatcaagattggttcaattaaaaaaaaaa

SEQ ID NO: 28 - DNA, 2041 bp, Lolium perenne
gaggaggtggtggaggagcacgaaatcccggccgccattcctccaccttccgctccgaccaaagatttccatccggcgagatccatgggctccatcgcggcagacttggcgccggaggcgcccgcggagctggtgttccggtcgaagctcccggacatcgagatcccgacccacctgacgctgcaagactactgcttcgagcgcctgccggagctctccgcccgcgcctgcctcatcgacggcgccacgggcgccgcgctcacctacggcgaggtggacgccctctcgcgccgctgcgcggccgggctgcgccgcctcggcgtccgcaagggcgacgtggtcatggcgctcctccgcaactgccccgagttcgccttcgtgttcctcggcgcggcccggctcggcgccgccaccaccaccgccaacccgttctacacgccccacgagatccaccgccaggccgccgcggccggcgccaaggtgatcgtcaccgaggcctgcgccgtcgagaaggtgcgcgccttcgccgccgagagagggatccccgtcgtctccgtcgacgaggccgtcgacgacggctgcctcccgttcgccgcgactctcctcggggaagaaagcggcgagcggttcgtcgacgaggcggtcgaccccgacgacgtggtggcgctgccgtactcgtccggcaccaccggcctgcccaagggcgtcatgctcacccaccgcagcctcgtcaccagcgtcgcccagcaggtggacggtgagaacccgaacctgcacttcagctcgtccgacgtgctgctgtgcgtgctgccgctgttccacatctactcgctcaactcggtgctgctcgccggtttacgcgccgggtgcgcgatcgtgatcatgcgcaagttcgaccacggcgctttggtggacctggtgcgcgcgcacggcgtcacggtggcgccattcgtgccgcccatcgtggtggagatcgccaagagcgcgcgggtgaccgccgcggacctggcgtcgatccggctggtcatgtcgggggcggcgcccatgggcaaggagctgcaggacgcgttcatggccaagatccccaacgctgtgctcgggcagggatatgggatgaccgaggccggccccgtgctagccatgtgcctggccttcgccaaggagccgttcgaggtcaagtctggctcctgcggcaccgtcgtccggaacgccgagctcaagatcgtcgaccccgacaccggcgcctccctcggccgcaacctgccgggggagatctgcatccgcggcaagcagatcatgaaaggttacctaaatgatccggaggccacaaagaacaccattgacaaggacggttggctgcatactggagacattggttatgtcgatgatgacgacgagatctttattgtcgacagactgaaggagataatcaaatataagggattccaagtacctccagcagaacttgaagcccttctcattacgcaccctgaaatcaaggatgctgctgtcgtatcgatgcaagacgaacttgctggtgaagttccggttgcgtttgttgtgcggactgaaggttcagagatcagcgaaaacgagatcaagcagttcgttgcaaaagaggttgttttctacaagaggatctgcaaagtgttcttcgcggattccattccaaagagtccatctggcaagatcctcaggaaggacctgagagcaaagctcgccgcaggcattcccggcagtgataccacacagtccaaaaactaagtcagatatattgtttcccaaccgtacacacctctgtccaacaccatgtaatgttcttaatataaacggaaattattacatatagaagggctgattctttttactagatgtgtccaacatatgatatgtttgttaggccgatgatgggtaacctgtcatgtatagataaccgcctttttttgataagaaaggctgattataatgtataccatgagctgaatatttgttcaagaagatcaggattcggttgccaattgtttaccttttaaaaaaaaaa

SEQ ID NO: 29 - DNA, 1934 bp, Festuca arundinacea
gggagcacggaatcccggccgccattcctccaccttcagctccggccaaagatttccatccggcgagatccatgggctccatcgcggcggacgcgccggaggcgcctcccgccgagctggtgttccggtccaagctcccggacatcgagatcccgacccacctgacgctgcaggactactgcttccagcgcctgccggagcactccgcgcgcgcctgcctcatcgacggcgccaccggcgccgcgctcacctacggcgaggtggacgcgctctcccgccgttgcgcggccggcctccgccgcctgggggtccgcaagggcgacgtcgtcatggcgctgctccgcaactgcccggagttcgccttcgtgttcctcggcgccgcccggctcggcgccgccaccaccaccgccaacccgttctacacgccccacgagatccaccgccaggccaccgccgccggcgccaaggtgatcgtcaccgaggcctgcgccgtcgagaaggtgcgcgcgttcgccgccgagagagggataaccgtcgtctccgtcgacgagggcgtcgacgacggctgcctcccgttcggcgagactctgctcggggaagacggcggcgagcggttcgtcgacgaggcggtcgacccggacgacgtggtggcgctgccgtactcgtccggcaccaccggcctccccaagggcgtcatgctcacccaccgcagcctcgtcaccagcgtcgcccagcaggtggacggtgagaacccgaatctgcacttcagctcgtcggacgtgctgctgtgcgtgctgccgctgttccacatctactctctcaactcggtgctgctggcggggctccgcgcgggttgcgcgatcgtgatcatgcgcaagttcgaccacggtgcgctggtggacctggtgcgcgcgcacggcgtcaccgtggcgccattcgtgccgcccatcgtggtggagatcgccaagagcgcgcgggtgacggcggcggacctggcgtccatccggctggtcatgtcgggggcggcgcccatgggcaaggagctgcaggacgcgttcatggccaagatccccaacgccgtgctcgggcagggatatgggatgaccgaggccggccccgtgctggccatgtgcctggccttcgccaaggagccgttcgaggtcaagtccggctcctgcggcaccgtcgtccggaacgccgagctcaagatcgtcgaccccgacaccggcgcctccctcggccgcaacctgcccggggagatctgcatccgcggcaagcagatcatgaaaggttacctaaatgatccggaggccacaaagaacaccattgacaaggacggttggctgcatactggagacattggttatgtcgatgatgacgacgagatctttattgtcgacagactgaaggagataatcaaatataagggattccaagtacctccggcagaacttgaagcccttctcattacgcaccctgaaatcaaggatgctgctgtcgtatcgatgcaagacgaacttgctggtgaagttccggttgcgtttgttgtgcggactgaaggttcagagatcagcgaaaacgagatcaagcagttcgttgcaaaagaggttgttttctacaagaggatctgcaaagtgttcttcgcggactccattccgaagagtccttctggtaagatccttaggaaggacctgagagcaaagctcgccgcaggcatccccggcagtgaaaccacacagtccaaaagctaagtcagatatattgtttcccaaccttacacacctctgtccaacatcatgtaatgttcttaatataaatggaaattaatacatatagaagggctgattctttttactagatgtccattgatatatttttagtccgatgatgtgtaccctgtcatgtatagataccgcctttattgaaaaaaaaaa

SEQ ID NO: 30 - DNA, 2014 bp, Lolium perenne
ggagagaggagatcaagcaagccatctcccacgactaatttagaagaagatttacttagtctctgcttctcgctcgatcgccggccggtgaggtagctagctagctactcgtactagatcattaccatgggttccgtgccggaggagtcagtggtgtccgtggccgcggcggagacggtgttccggtcgaagctccccgacatcgagatcaacaacgagcagacgctgcagagctactgcttcgagaagatggccgaggtcgcgtcccgcccctgcatcatcgacggccagacgggcgcctcctacacctacacggaggtcgactacctgacccgtcgcgccgcggcggggctgcgccgcatgggcgtggggaagggcgacgtggtgatgaacctgctccgcaactgccccgagttcgccttctccttcctgggcgcggccaggctgggcgccgccaccaccaccgccaacccgttctacaccccgcacgagatccaccgccaggcggaggcggcgggcgccaagctgatcgtcaccgaggcctgcgccgtggagaaggtgctggagttcgcggcggggcggggcctgcccgtggtcaccgtcgacgggaggcgcgacgggtgcgtggacttcgcggagctgatcgccggcgaggagctgcccgaggcggacgaggccgggatcctccccgacgacgtcgtcgccctgccctactcctccggcaccaccgggctccccaagggcgtcatgctcacccaccgcagcctcgtcaccagcgtcgcccagctggttgacgggtcgaacccaaacgtgtgcttcaacaaggacgacgcgctgctgtgcctgctgccgctgttccacatctactcgctgcacacggtgctgctggcggggctccgcgtcggcgccgccatcgtcatcatgcgcaagttcgacgtcggcgcgctggtggacctcgtccgcgcgcaccgcatcaccatcgcgccattcgtgccgcccatcgtcgtggagatcgccaagagcgaccgcgtcggcgccgacgacctcgcatccatccgcatggtgctctccggcgccgcgcccatgggcaaggacctccaggacgccttcatggccaagatccccaacgccgtgctcggacagggttacgggatgactgaggccgggccggtgctggccatgtgcctggcgttcgccaaggagcccttcaaggtcaagtccgggtcgtgcggcaccgtggtgcgcaacgcagagctcaaggtcgtcgaccccgacaccggcgcatccctcggcaggaaccagcccggcgagatctgcgtccgcgggaagcagatcatgataggttacctgaacgacccagagtctaccaagaacaccatcgacaaggacggctggctgcacaccggagatatcggcttggtggacgacgacgacgagatcttcatcgtcgacaggctcaaggagatcatcaagtacaagggcttccaggtggcgccggcggagctcgaggccctcctcctcacgaacccggaggtcaaggacgccgccgtcgtaggggtgaaggatgatctctgcggcgaagtcccggtcgccttcattaagaggatcgaaggatctgagatcaccgagaacgagatcaagcaattcgtctcaaaggaggttgttttctacaagaggatcaacaaggtctacttcaccgactccattcccaagaacccttccggcaagatcgtaaggaaggacttgagagccaggctcgccgctggcatccccaccgaagttgccgcgccgagaagctaagggccgcttctcaggaacgcaatcacccatggtgctgtttaggtgctgttatagaccacaccaaatggggaaagaaactacgggaggggatcatattattcttgcaggagatatcagtttgttgattcgccctgcttgtgtaatgttgataaaatgaaatgatagaatagatgtgttgttttattttttgaccatgtaaaaaaaaaaaaaaaaa

SEQ ID NO: 31 - DNA, 2073 bp, Festuca arundinacea
gagcaagcgcgcgcacgcactcgcaccatctcccacgactaatttaaccaccttacaagaagatttccttagtctccgtttctctctcgatcgccggccggtgaggtagctagctagctactcgtagatcattaccatggggtctgtgccggaggagtcagtggtagccgcggccgtggcggagacggtgttccggtcgaagctccctgacatcgagatcaacaacgagcagacgctgcagagctactgcttcgagaagatggccgaggtcgcatcccgcccctgcatcatcgacgggcagacgggcgcctcctacacctacacagaggtggagtccctgacccgtcgcgccgcggcggggctccggcgcatgggcgtggggaagggcgacgtggtgatgaacctgctccgcaactgccccgagttcgccttctccttcctgggcgcggcgcggctcggcgccgccaccaccaccgccaacccgttctacaccccgcacgagatccaccgccaggcggaggcggcgggcgccaaggtgatcgtcacggaggcctgcgccgtggagaaggtgctggagttcgcggcggagcggggactgcccgtggtgaccgtcgacgggaagcgcgacgggtgcgtcgacttcgcggagctgatcgccggcgaggagctgcccgaggcggaggaggccgggatcctccccgacgacgtcgtggccctgccgtactcgtccggcaccaccgggctccccaagggcgtcatgctcacccaccgcagcctcgtcaccagcgtcgcccagctgtttgacgggtcgaacccgaacgtgtgcttcaacaaggacgacgcgctgctgtgcctgctgccgctcttccacatctactcgctgcacacggtgctgctggcggggctccgcgtcggggccgccatcgtcatcatgcgcaagttcgacgtcggcgcgctggtggacctcgtccgcgcgcaccgcatcaccatcgcgccattcgtgcccccgatcgtggtggagatcgccaagagcgaccgcgtcaccgccgacgacctcacatccatccgcatggtgctctccggcgccgcgcccatgggcaaggacctccaggacgcgttcatggccaagatccccaacgccgtgctcggacagggttacgggatgactgaggccggtccggtgctggccatgtgcctggcgttcgccaaggagcccttcaaggtcaagtccgggtcctgcggcaccgtggtgcgcaacgccgagctcaaggtcgtcgaccccgacaccggcgcatccctcggccggaaccagcctggcgagatctgcgtccgcgggaagcagatcatgataggttacctgaacgacccagagtcgaccaagaacaccatcgacaaggacggctggctgcacaccggagacatcggcttggtggatgacgacgacgagatcttcatcgtcgacaggctcaaggagatcatcaagtacaagggcttccaggtggcgccggcggagctcgaggccctcctcctcacgaacccggaggtcaaggacgccgccgtcgtaggggtgaaggatgatctctgcggcgaagtcccggtcgccttcattaagaggatcgaaggatctgagatcaccgagaacgacatcaagcaattcgtctcaaaggaggttgttttctacaagaggatcaacaaggtctacttcaccgactccattcccaagaacccttccggcaagatcctaaggaaggacttgagagccaggctcgccgctggcatccccaccgaggttgccgcgccaagaagctaagggccgctcctcaggaacgcagtcacccatggtgctgttatagaccacaccaaatggggaaagaaactacgggagggtacatgatcagattattcttgcaggagatatcagtttgttggttcgccctgcttgtgtaatgttgataaaatgaaatgatataatagatgtgttgttttatttttttgaccatgtaagaacaaggctgggattttactcccaaacaaacaaaaagaacaaggctgggatttttttcaaaaaaaaaa

SEQ ID NO: 32 - DNA, 1798 bp, Lolium perenne
gctcaacactcgccaatcccacagccacagaagccacctaccaccgctccaccgatcgacgatggaggtcctcctcctggagaaggccctactggggctcttcgcggcggcggtgctggccatcgccgtcgcgaagctcgccggcaagcgcttccgcctcccgcccggcccctccggcgcccccatcgtcggcaactggctccaggtcggcgacgacctgaaccaccgcaacctgatgggcatcgcgaagcggttcggggaggtgttcctgctccgcatgggcatccgcaacctggtggtggtgtccagcccggagctggccaaggaggtgctccacacgcagggcgtggagttcggctcccgcacccgcaacgtcgtcttcgacatcttcaccggcaacggccaggacatggtcttcaccgtctacggcgaccactggcgcaagatgcgccggatcatgaccgtccccttcttcaccaacaaggtggtggcgcagaaccgggtgggctgggaggaggaggccaggctcgtggtggaggacgtcaaggccgacccggcgttcgcgaccgccggcaccgtgatccgccgtaggctgcagctcatgatgtacaacgacatgttccgcatcatgttcgaccgcaggttcgagtccgtcgacgacccgctcttcaacaagctcaaggccatgaacgccgagcgcagcatcctgtcgcagagcttcgactacaactacggcgacttcatccccattctccgaccgttcctccgcaagtacctcaaccggtgcacaaacctcacgaccaagaggatgaagctcttcgaggaccacttcgtcgctgacagaaagaaggcgctggagcagaatggggagatcaggtgcgccatggaccacatcctggaggcggagaggaagggcgagatcaaccacgacaacgtcctctacatcgtcgagaacatcaacgttgcagccatcgagacaacgctgtggtcgatcgagtggggcatcgcggagctggtgaaccacccggacgtccagtcgaagctccgcgacgagatgaccgccgtgctgggcgccgacgtggcggtgacggagccggacctggagcgcctcccctacctgcagtccgtcgtgaaggagaccctccgcctccgcatggccatcccgctgctcgtgccgcacatgaatctcagcgacgccaagctcgccggctacgacatccccgccgagtccaagatcctcgtcaacgcatggttcctcgccaacgaccccaagcggtgggtgcgcgccgacgagttcaggcccgagcgcttcctggaggaggagaaggccgtcgaggcccacggcaacgacttccgcttcgtgcccttcggcgtcggccgccggagctgccccgggatcgtcctcgcgctgcccatcatcggcatcacgctcggacgcctcgtgcagaacttccagctgctgccgccgcccgggcaggacaagatcgataccaccgagaagcccggacagttcagcaaccagatcctcaagcacgccaccgtcgtctgcaagccgctcgaggcctagaattttctatttgatcgtatggaggcttctgacatgcgtgtctgtgcatgcatgcgtgaacgctggtgccgggagatcgatctatgcacgcatgtgatgtgtattttcctttttttgtgcttttattttacttagttgcatttttgttggtcttcatgtaaggcgtcatgttgtagatttgctatgttggtgataatgatgtaaaacttcttcaaaaaaaaaaaaaaaaaa

SEQ ID NO: 33 - DNA, 1775 bp, Festuca arundinacea
gcaacaaccgttactgagcgcgcgaaaacgcacgagagagagagtgaagcggcgcgtgtattcttcactggccgtcgccatggatttcgtcttcgtggagaagctcctcgtcgggctcctagcgtccgtggtggtcgcgatcgtcgtgtccaagatccgcggccgcaaactgaggctgccgccgggccccatccccgtgcccatcttcggcaactggctgcaggtcggggacgacctgaaccaccgcaacctggcggcgatggcccgcaagttcggggaggtgttcctcctccgcatgggcatccgcaacctggtggtggtgtcgagcccggagctggccaaggaggtgctccacacgcagggcgtggagttcgggtcccgcacacgcaacgtcgtcttcgacatcttcaccggcaaggggcaggacatggtgttcacggtgtacggcgaccactggcgcaagatgcggcggatcatgacggtgcccttcttcacgaacaaggtggtgcagcagtaccgggccgggtgggaggcggaggcggccttcgttgtggacaacgtgcgcgccgaccccaaggccgccaccgacggcgtggtgctccgccgccacctgcagctgatgatgtacaacaacatgtaccgcatcatgttcgaccggcggttcgagagcatggacgacccgctcttcctccgcctcagggcgctcaacggcgagcgcagccgcctggcgcagagcttcgagtacaactacggcgacttcatccccgttctccgccccttcctccgcggctacctcgggctctgcgaacaggtcaaggagacccgcctcaagctcttcaaggattacttcctggacgagaggaagaagctggcgagcacaaagtccatggacaccaacggcctcaagtgcgccattgatcacatcctggaggcgcaggagaagggagagatcaacgaggacaacgtcctctacatcatcgagaacatcaacgtcgccgcgatcgagacgacgctgtggtcgatcgagtgggggatcgcggagctggtgaaccacccggagatccagcagaagctgcgcgacgagatggacgcggtgctgggcgccggccaccagatcacggagcccgacacgcacaagctcccctacctgcaagccgtgatcaaggagacgctgcggctgcgcatggctatcccgctgctggtgccgcacatgaaccttcacgacgccaagctcgccggctacaacatccccgccgagagcaagatcctcgtcaacgcctggttcctcgccaacaacccggagcagtggaagaggcccgacgagttccgccccgagcgcttcctggaggaggagaagcacgtcgaggccagcggcaacgacttcaggttcctgcccttcggcgtcggccgccggagctgcccggggatcatcctcgcgctgcccatcctcggcatcaccatcggccgcctcgtgcagaacttcgagctcaccacgccgccgggggtggacaagctcgacaccaccgagaagggtggccagttcagcctccacatcttgaaccactccaccatcgtcgccaagcccagagtgttctgagttctgagttgcgtgcagcttctggtttgatgctgtactctcttgcgtgcatgtttgctcgtcctaaaaccttaattatgtatgtctactacagagtagatacaagtttcgtatgttatctgcaagaaacagaggatatatatgaacttttttaaaaaacagtaaaaaaaaaaaaaaa

SEQ ID NO: 34 - DNA, 1323 bp, Lolium perenne
tcctctcgccgacgcgctcagagccaagagcatgggcatcgtcaacgcctccgagaagacgatcaccggctgggccgccagggacgccaccggccacctctccccgtacacgtacaacctcaggaggacgggcgctgaagatgtggtgctgaaggttctgtactgcggcatctgccacactgacctccaccagaccaagaaccaccttggtgctccaaaataccccatggttcccgggcatgaggtggtaggcgaggtggtggaggtcgggccggaggtgagcaagtacagcgtcggcgatgtggtcggcgtgggggtgatcgttgggtgctgccgcgactgccggccgtgcaaggccaacgttgagcagtactgcaacaagaagatctggtcgtacaacgacgtctacaccgacggaaagcccacgcagggcggcttcgcctcctccatggtcgtcgaccagaagttcgtggtgaagatcccagcggggctagcgccggagcaggcggcgccgctgctgtgcgctggcgtcacggtgtacagcccgctgaagcacttcgggctgatgaccccgggcctccgcggcggcatcctcggcctgggcggcgtgggccacatgggcgtgaaggtggccaagtccatgggccaccacgtcaccgtgatcagctcctccgacaagaagcgcgccgaggccatggacgacctgggcgccgacgcctacctcgtcagctccgacgaggcccagatggccgccgccatggactcgctggactacatcatcgacaccgtgcccgtcaagcacccgctcgagccctacctcgcgctgctcaagatggacggcaagctcgtcctcatgggcgtcattggcgagccgctcagcttcgtgtcccccatggtcatgctcgggaggaagaccatcacgggcagcttcatcgggagcatcgaggagaccgaggaggtgctcaggttctgcgtcgacaagggcctcacctcgcagatcgaggtcgtcaagatggactacctcaaccaggcgcttgagaggctcgagcgcaacgacgtcaggtaccgcttcgtcgtcgacgtcgcagggagcaacatcgacgacactgccgcatgatcaacttggcaacgacgagcgaacctccattgagcgcgacaatttccgtgacatatactcctcaacttggttcaatacatgattgtgaactgtgtgaatgtgtttccgtcttctatcagagattcagagtgtgcatgttagtttcaataggaagaaatgtttggtatgagtccggcctaataataacggatttgctaaaaaaaaaa

SEQ ID NO: 35 - DNA, 1313 bp, Festuca arundinacea
ggtcccaagcccacccaatcctcaccagcatctctctcgcccacgcctccgatctcctctcgccgccgcgctcagtgccaagagaatgggcagcgtcgacgcctccgagaagacgatcaccgggtgggccgccagggacaccaccggtcacctctccccctacacgtacaccctcaggaggacgggcgctgaagatgtggtgctgaaggttctgtactgcggcatctgccacactgacctccaccagaccaagaaccaccttggtgcctcaaaataccccatggttcccgggcatgaggtggtaggcgaggtggtggaggtcgggccggaggtgagcaagtacagcgtcggcgacgtggttggcgtcggggtgatcgtcgggtgctgccacgactgccggccgtgcaaggccaacgttgagcagtactgcaacaagaagatctggtcgtacaacgacgtctacaccgacggcaagccaacgcagggcggcttcgcctccgccatggtcgtcgaccagaagttcgcggtgaagatcccggcggggctggcgccggagcaggcggcgccgctgctctgcgcgggggtgacggtgtacagcccactgaagcactttgggctgatgaccccaggcctccgcggcggcatcctgggcctcggcggcgtgggccacatgggcgtgaaggtggccaagtccatgggccaccacgtcaccgtgatcagctcctccaacaagaagcgcgccgaggccatggacgacctcggcgccgacgcctacctcgtcagctccgacgaggcccagatggccgccgccatggactcgctcgactacatcatcgacaccgtgcccgtcaagcacccgctcgagccctacctcgcgctgctgaagatggacggcaagctcgtcctcatgggcgtgatcgccgagccgctcagcttcgtgtcccccatggtcatgctcgggaggaagaccatcacggggagcttcatcggcagcatcgaggagaccgaggaggtgctcaggttctgcgtcgaaaagggcctcacctcgcagatcgaggtcgtcaagatggactacctcaaccacgcccttgagaggctcgagcgcaacgacgtcaggtaccgcttcgtcgtcgacgtcgctgggagcaacatcaaggacgccgacgcctgatcgacttggaacctactccaagatagagcgcgataatttccgtgacatatgctcctcaactcggtgcagtacatgattgtgacctgtgtgtgaatttgtttccgtcttctatcagagtgcgtgctagtttccatggaaaaaa

SEQ ID NO: 36 - DNA, 1059 bp, Lolium perenne
gcaatcatccagcccagatctcacgcgtttccttcctccagctaaagaccggcaatggcgaccacggcggctgatgccacggccacggttgccaaggagcagaccaccaccaacggcgccgccagcggtgccgagcaggtcacccgccactccgaggtcgggcacaagagcctgctccagagcgacgcgctctaccagtacatcctggagaccaccgtgtacccgcgcgagcacgagtgcatgaagcagctccgcgaggacaccgccaaccacccatggaacctgatgaccacgtcggcggacgagggccagttcctcaacctgctcatcaagctcatcggcgccaagaagaccatggagatcggcgtctacaccggctactccctcctcgccaccgcgctcgccatccccgaggacggcacgatcttggccatggacatcaaccgcgagaactacgagaccatcggcaagccgtgcatcgagaaggccggcgtcgcgcacaagatcgacttccgcgaggggcccgcgctcccggtgctcgacgagctgctcgaggacgaggccaaccacggcaccttcgacttcgtcttcgtcgacgccgacaaggacaactacctcaactaccaccagcgcctcatgaagctcgtcagggtcggcggccttctcggctacgacaacacgctctggaacggatccgtcgtgctccccgccgacgcgcccatgcgcaagtacatccgctactaccgcgacttcgtcctcgagcttaacaaggccctcgccgcagacgaccgcgtcgagatctgccagctccccgtcggcgacggcatcaccctctgccgccgcgccaagtgattgtctgattgatgacgcgagcgcgccgccccctcggctccgctccgctccatggatgcggacaagaattgattaattattattccccattttgccgttctggctttcttctgtatcttcttggaaacaaatattgtccctttatgtacgtatatcaaatttatatccagacaaataatattactcctataaaaaaaaaaaaaaaaa

SEQ ID NO: 37 - DNA, 1063 bp, Festuca arundinacea
ggtcgactcagcaagacagcccaatcatccagcccagatctcgcgcgtttccttcctccagctaaagaccggcaatggcgaccacggcggctgatgccacggccacggtgcccaaggagcagcccgccaccaacggcgccgccagcggtgccgagcaggtcacccgccactccgaggtcggccacaagagcctgctccagagcgacgcgctctaccagtacatcctggagaccaccgtgtacccgcgcgagcacgagtgcatgaagcagctccgcgaggacaccgccaaccacccatggaacctgatgaccacgtcggcggacgagggccagttcctcaacctgctcatcaagctcatcggcgcaaagaagaccatggagatcggcgtctacaccggctactccctcctcgccaccgcgctcgccatcccagaagacggcacgatcttggccatggacatcaaccgcgagaactacgagaccatcggcaagccgtgcatcgagaaggccggcgtggcgcacaagatcgacttccgcgaggggcccgcgctcccggtcctggacgagctgctcgaggacgaggccaaccacggctccttcgacttcgtcttcgtcgacgccgacaaggacaactacctcaactaccaccagcgcctcatgaagctcgtcagggtcggcggcctcatcggctacgacaacacgctctggaacggatccgtagtgctccccgccgacgcgcccatgcgcaagtacatccgctactaccgcgacttcgtcctcgagctcaacaaggccctcgccgcagacgaccgcgtcgagatctgccagctccccgtcggcgacggcatcaccctctgccgccgcgccaagtgattgtctgattgatgacgctcgcgcgccgccccctctgctccgctccatggatgcggacaagaattaattaattattccccattttgcctttcttgctttcttctgtatcttcttggaaacaaatattgtccttttatgtacgtatacaaatttatatccagacaaataatattactcctataaaaaaaaaa

SEQ ID NO: 38 - DNA, 1333 bp, Lolium perenne
ggacgaatcctaccaaaccgagctaccagatccttctctactaatcgagctccctccgcctgtcctcgaccccgcctcaccgccggccggttctccgctccgagctatacgtccgtccgagaacacccgtcccatattaactatcaacatgacagtcgtcgaggtcttagctgccggcgacgccgccgccgccgcggtggcgcggcccgccgggaacgggcagaccgtgtgtgtgaccggcgccgccgggtacatcgcgtcctggctcgtcaagctgctgctggagaaggggtacactgtcaagggcaccgtcaggaacccagacgacccgaagaacgcgcacctgagggcgctcgacggcgccgccgaccggctggtcctctgcaaggccgacctcctcgactacgacgccatccgccgcgccatcgacggctgccacggcgtcttccacaccgcatccccagtcactgacgaccccgagcaaatggtggagccggcggtgaggggcacgcagtacgtcatagacgcggcggcggaggccggcacggtgcggcggatggtgctcacctcctccatcggcgccgtcaccatgcaccccaaccgcgggccggacgtggtcgtcgacgagtcgtgctggagcgacctcgacttctgcaagaaaaccaggaactggtactgctacgggaaggcggttgcggagcaggcggcatcggagttggcgcggcagcgcggcgtggaccttgtggtggtgaacccggtgctggtgatcggccccctgctgcagccgacggtgaacgcaagcatcggccacatcctcaagtacctggacgggtcggccagcaagttcgccaacgccgtgcaggcgtacgtggacgtccgcgacgtggccgacgcccacctccgcgtcttcgagtgcgccgccgcgtccggccgccacctctgcgccgagcgcgtcctccaccgcgaggacgtcgtgcgcatcctcgccaagctcttccccgagtaccccgtccccacaaggtgctccgacgaggcgaacccgaggaagcagccatacaagatgtctaaccagaagctccaggacctcggactcgagttcaggccggtgagccagtccctgtacgagacggtgaagagcctccaggagaagggccaccttccggtgctcagcgagcaggcagaggcggacaaggaaaccctggctgcagagctgcaggcaggggttaccatccgagcatgaggaacaagaaatcaaccatgtccatactgctactgtcatgtaaaccaggcagtgtctgttgaatgcctaatctaagttcttgtaaaaaaaaaa

SEQ ID NO: 39 - DNA, 1237 bp, Festuca arundinacea
gcaagagctagttcttctgtccatccgtagctcttccctttcaccaacaagctagtttagacaagtacagtggtactgtaagagcaacaatgaccgttgtcgacgccgccgcgccgcagctgcctggccatgggcagaccgtgtgcgtcaccggcgccgcggggtacatcgcgtcggggctcgtcaagctgctcctggagagaggctacaccgtgaagggcacagtgaggaacccagatgatcccaagaacgcccacctgaaggcgctggacggcgccaccgagaggctgatcctctgcaaagccgacctcctcgactacgacgccatatgcgccgccgtcgagggctgccacggcgtgttccacaccgcctctccagtcaccgatgatcctgagcagatggtggagccggcggtgcggggcacggagtacgtgatcaacgcggcagcggatgcgggaacggtgcgccgggtggtgttcacgtcgtcaatcggtgccatcaccatggaccccaaccgcggtcctgacgtagtcgtcaatgagtcctgctggagcgacctcgaattctgcaagaaaaccaagaactggtactgctacggcaaggccgtggcggagcaggctgcgtgggaggcggccaggaagcgcggcatcgacctcgtcgtcgtgaaccctgtgctcgtggtagggccgctgctgcaaccaacggtgaacgctagcgccgcacacatcctcaagtacctcgacggctcggccaagaagtacgccaacgctgtgcagtcatacgtagacgtgcgtgacgtagccggcgcgcacatccgggtgttcgaggcgcctgaggcgtcgggccggtacctctgcgccgagcgcgtgctgcaccgtggggacgttgtccaaatcctcagcaaactcttccctgagtaccctgtgccaacaaggtgctctgatgaagtgaacccacggaagcagccttataagatgtccaaccaaaagctgcaggatcttggcctccagttcactcctgtgaacgactctctgtatgagaccgtaaagagcctccaggagaagggacatctcctagtaccaagcaaaccagagggattaaacggtgtaacggcatgatactgctaaaaaagcagcagagttcacgtgctcctgtaacatggtcaaacatgagttgtttttctgtataaattctatccagtatcgtgttatttaagtgaactaagagaaaaaaaaaa

SEQ ID NO: 40 - DNA, 1429 bp, Festuca arundinacea
gctctcgatcggcagacgcagagatcgatgggttccaccgccgccgacatggccgcgtccgccgaccaggaggcgtgcatgttcgccctccagctcgcctcctcgtcgatcctcccgatgacgctgaagaacgccatcgagcttggcctcctggagatcctggtggccgccggcggcaagtcgctgacccccaccgaggtggccgccaagctcccgtccgcggcgaacccggaagcgccggacatggtggaccgcatgctccggctgctcgcgtcgtacaacgtcgtgacgtgcctggtagaggagggcaaggacgggcgcctctcccggagctacggcgccgcgcccgtgtgcaagttcctcacccccaacgaggacggcgtctccatggcggcgctcgcgctcatgaaccaggacaaggtcctcatggagagctggtactacctcaaggacgcggtccttgacggcggcatccccttcaacaaggcgtacggcatgtcggcgttcgagtaccacggcacggacccgcgcttcaaccgcgttttcaacgaagggatgaagaaccactccatcatcatcaccaagaagctcctcgagctctaccacggcttccagggcctcggcaccctcgtcgacgtcggcggcggcgtcggcgccaccgtggccgccatcgccgcccactaccccgccatcaagggggtcaacttcgacctcccccacgtcatctccgaggcgccgcagttcccgggcgtcacccacgtcggcggcgacatgttcaaggaggtgccctcgggcgacgccatcctcatgaagtggatcctccacgactggagcgaccagcactgcgccacgctgctcaagaactgctacgacgcgctgccggcgcacggcaaggtcgtgctcgtcgagtgcatcctgccggtcaacccggaggccaagcccagctcgcagggggtcttccacgtcgacatgatcatgctcgcgcacaaccccggcggcagggagaggtacgagagggagttcgaggccctggccaggggagctgggttcaccggcgtcaagtccacgtacatctacgcaaacgcgtgggccatcgagttcaccaagtagatgagatccctccggcctccatgcatccaggcaacctccccccgatatgagaacgatcgtcgtcgattttgctggctgctgcctttgctcctgcatcgatttgcaaacggaccctttggttggtttttcctctgttttccctaattttttcatgctctgaattttgaattttgatggctgggtcgtcgatctgctcggaaatgttttgaaaaggttgggtatgttggaaacttgtatgtgatgtaatgagatgatttttttcctttgttgaaaactcgagtaaattgaagtgactttcatcttcctttgaaaaaaaaaa

SEQ ID NO: 41 - DNA, 1457 bp, Lolium perenne
gctctcgctcacaccaaaatcgcccaccagcaccagcatctctcgatcggcagacgcatagatcgatgggctccaccgccgccgacatggccgcgtccgccgacgaggacgcgtgcatgttcgccctccagctcgcttcctcgtcggtcctcccgatgacgctgaagaacgccatcgagcttggcctcctggagatcctggtggccgccggcggcaagtcgctgaccccgaccgaggtggccgccaagctcccgtccgcggcgaacccggaagcgccggacatggtggaccgcatactccggctgctcgcgtcgtacaacgtcgtgacgtgcctggtggaggagggcaaggacggccgcctctcccggagctacggcgccgcgcccgtgtgcaagttcctcacccccaacgaggacggcgtctccatggcggcgctcgcgctcatgaaccaggacaaggtcctcatggagagctggtactacctcaaggacgcggtccttgacggcggcatcccgttcaacaaggcctacggcatgtcggcgttcgagtaccacggcacggacccgcgcttcaaccgcgtcttcaacgaagggatgaagaaccactccatcatcatcaccaagaagctcctcgagctctaccacggcttcgagggtctcggcagcctcgtcgacgtcggcggcggcgtcggcgccaccgtggccgccatagccgcccactaccccaccatcaagggggtcaacttcgacctcccccacgtcatctccgaggcgccgcagttcccgggcgtcacccacgtcggtggcgacatgttcaaggaggtgccctcgggagacgccatcctcatgaagtggatcctccacgactggagcgaccagcactgcgccacgctgctcaagaactgctacgacgcgctgccggcgcacggcaaggtcgtgctcgtcgagtgcatcctgccggtcaacccggaggccaatcccagctcgcagggggtcttccacgtcgacatgatcatgctcgcgcacaaccccggcggcagggagaggtacgagagggagttccaggctctcgccaggggagccggattcaccggcgtcaagtccacgtacatctacgccaacgcgtgggccatcgagttcaccaagtagatgagatccctccaagcatccaggcaacatgtccccccgatatgagaacgatcgtcgtcgatcttggtgggtgctgccgctgctcctgcatcgatcaccctttgcttggtttttcctctgttttccctaattttttcatgctttaaaaccattctgaattttaatggttgggtcgccgatctgctcggaatgtaccattaaaaacgatgttttgaaaaggttgggtatgttggaaacttgtatgtgatgtaatgaaatgatttttttccctttgttgaaaaaacgagtaaattgaagtgaaaaaaaaaa

SEQ ID NO: 42 - DNA, 1452 bp, Festuca arundinacea
gctcgctcacaccaaaatcacccaccagcaccagcatctctcgatcggcagaggcagagatcgatgggctccaccgccgccgacatgaccgcgtccgccgacgaggaggcgtgcatgttcgccctccagctcgcctcctcgtcgatcctcccgatgacgctgaagaacgccatcgagcttggcctcctggagatcctggtggccgccggcggcaagtcgctgacccccaccgaggtggccgccaagctcccgtccgcggcgaacccggaagcaccggacatggtggaccgcatgctccggctgctggcgtcgtacaacgttgtgtcgtgcctggtggaggagggcaaggacggccgcctctcccggaactacggcgccgcgcccgtgtgcaagttcctcacccccaacgaggacggcgtctccatggcggcgctcgcgctcatgaaccaggacaaggtcctcatggagagctggtactatctgaaggacgcggtccttgacggcggcatcccgttcaacaaggcgtacggcatgtcggcgttcgagtaccacggaacggacccgcgcttcaaccgcgtgttcaacgaagggatgaagaaccactccatcatcatcaccaagaagctcctcgagctctacgacggcttccagggactcggcaccctcgtcgacgttggcggcggcgtcggcgccaccgtggccgccatcaccgcccactaccccgccatcaagggggtcaacttcgacctcccccacgtcatctccgaggcgccgccgttcccgggcgtcacccacgtcggcggcgacatgttcaagaaggtgccctcgggcgacgccatcatgatgaagtggatcctccacgactggagcgaccagcactgcgcaacgctgctcaagaactgctacgacgcgctgccggcgcacggcaaggtggtgctggtggagtgcatcctgccggtgaacccggaggccaagcccagctcgcagggggtgttccacgtcgacatgatcatgctcgcgcacaaccccggcggcagggagaggtacgagagggagttcgaggccctcgccaggggagctgggttcgctggcgtcaagtccacatacatctacgccaacgcctgggccatcgagttcaccaagtagatgagatccctccatccaggcaacctcccaccgaaatgagaatcgtgggtattcgatcttgctggctgctgccgctgctcctgcatcgatctgcatacgtaccctttgcttggtttttcctctgttttccgtaattttctcatgctctgaatccattctgaattctaatggttgtgtcgtcgatctgctcggaatgtaccattaataatgctgttctgaaaaggttgcatatgttgtatatgatgtaatggcatgatttctctcctttgttgaatataccagtacattgaagtgtcaaaaaaaaaa

SEQ ID NO: 43 - DNA, 1440 bp, Lolium perenne
gctcgggtctctcgctcatactaccaaaaacacccagcagcacaccagcgtctctcggcccaggagaagcagacacaggcagagatgggctccaccgcagccgaaattgccgcgtccgccgacgaggaggcgtgcttgtacgccctccagctcggctcgtcgtcgatcctcccaatgacgctgaagaacaccatcgagcttggcctcctggagaccctcatggccgccggcgggaagtcgctgacccccaccgaggtggccgcaaagctcccgtgcgcagcgaagaacccggaagcaccagacatggtggaccgcatgctccggctgctggcgtcgtacaacttagtgtcgtgccttgtggaggagggtacggatggccgcctctcccggcggtacggcgccgcgccggtgtgcaagttcctcacccccaacgaggacggcgtctccatggcggcgctcgcgctcatgaaccaggacaaggtcctcatggagagctggtactacctgaaggacgcggtccttgacggcggcatcccgttcaacaaggcgtacggcatgtcggcgttcgagtaccacggcacagacctgcgcttcaaccgcgtgttcaacgaagcgatgaagaacaattccatcatcatcaccaagaagctcctccagctctacgacggcttccagggcctcggcaccctcgtcgatgtcggcggcggcgtcggcgccaccgtggccgccatcaccgcacactaccccaccatcaaggggatcaacttcgacctcccccacgtcatctccgaggcgccgccattcccgggcgtcacccacatcggcggcgacatgttcaagaaggtgccctcgggtgacgccatcctgatgaagtggatcctccacgactggagtgaccagcattgcgccacgctgctcaagaactgctacgacgcgctgccagtgcacggtaaggtggtgctggtggagtgcatcctgccggtgaacccggaggccaagcccagctcgcagggggtgttccacgtcgacatgatcatgctcgcgcacaacccaggcggcagggagaggtatgagagggagtacgaggcgctcgccaggggagctggcttcgccggcttcaagtccacatacatctacgccaacgcctgggccatcgagttcaccaagtagacgagaatcatgggtcttcgatcttgctggatgctgctgctgctccttcggtcaatctgcatgtgtaccctttgcttggtatttcctctgttttccataattttctcatgctctgaatctattccgaattctgatggctgtcgtcgatctgctcggaatgtaccattaataacgctgttcggtaaaggttgcatacagtatgttgtatgtgatgtaatgagatgatttatcccctttgttgaataaataaatttaagcttaaaaaaaaaa

SEQ ID NO: 44 - DNA, 2102 bp, Lolium perenne
gcatcaacctaaaacccacgctatccaacaccccctagagaaaaacaaaaacaaaaagattacagttcctggtttgagtatcaatcgatggtgggcttcgctaagatcgccatggagtggatccaagatccactgagctggctgttcatcgcctccgtggttttcgtggttctgcagcggcggcggcggggcaacgtggcgccgtttcccccgggcccgaaaccgctgccgatcgtcggcaacatgtcgatgatggaccagctcacccaccgtggcctggcggcgctagcgaaggagtacggcggccttctccacatccggctcggtaagctccacacctttgccgtgtcgacgccagagtatgcccgggaggtgctgcaggtgcaggacggtgccttctcgaaccgtcccgcgaccatcgccatcgcgtacctcacctacgaccgagccgacatggcgttcgcgcactacgggcccttctggcgccagatgcgcaagctgtgcgtgatgaagctcttcagccggcgccgcccggagacgtggctcgccgtgcgcgacgagtccgcggctctcgtccgcgccgtggccaggcggaccggcgagtccgtggacctcggcgagctcatttttaaactcaccaagaatgtcatcttccgcgccgcgttcggagctggtgcggtcgccgccgacgccgaggagggcgacggagcagggaagcaggacgagttcatcgccatcctccaggagttctccaagctcttcggcgccttcaacatcggagacttcatcccgtggctgagctgggcggacccgcagggcatcaacgtgcgcctccgcgccgcgcgcaacgccctcgacgagttcatcgacaagatcatcgacgagcacatggagaggggcaagaatcccgatgatgccgatgccgacatggtggacgacatgctcgcgttcctcccggaggcgaagccgaagaagggcgccgccggcgacggcgtggacgacctgcagaacacgctccgcctcacccgcgacaacatcaaggccattatcatggacgtgatgtttggcgggacggagacggtggcgtcggcgatcgagtgggcgatggcggagatgatgcacagccccgacgacctccgccgcctgcagcaggagctcgtcgacgtggtggggctcgaccggaacgtggacgagtcggacctcgacaagctccccttcctcaagtgcgtcatcaaggagacgctccggctgcacccgcccatcccgctgctcctccacgagaccgccgaggactgcgtcgtcggcggctactccgtgccccggggctcccgcgtcatgatcaacgtctacgccatcggccgcgaccgcagggcgtggaaggacgccgacgtgttccggccgtcgcggttcgtgcagggggaaggggaggccgccgggctcgacttcaaggggggatgcttcgagttcctgcccttcgggtcaggccgccgctcctgccctggcatggcgctcggcctgtacgcgctggagctcgccgtggcgcagctcgcgcacggtttcagctgggagctgcccgacgggatgaagccgtcggagctggacatgagcgacgtcttcggcctcaccgccccgcgcgccaccaggctcttcgccgtgcccacgccccgcctcgcatgcacccagctgctgggagctgacgacgccgggcgccaggcgtgacggccattgctgtgttagcaagcgatcgatggtatatgtaccagctggccggaagatgaaggtgtttgatatattcagaggtgatggcggaggcgccattggtggagcttggtggttttatcttgctttttttttactatttttcttaaactttgaactcaattaagtctggtgacaacagaacccaataagcggattatcatgcttgctggatgcatgcttggatacagtgttaagcatgatgtgttttaccatgaagaacgcaaattgtaaaaacaagtttttagacctgctgccccgagattctgtattttcttcctcttggttttccatcgtgaggactatattaatgccaggatgatagtacccgttgaaaaaaaaaa

SEQ ID NO: 45 - DNA, 2051 bp, Festuca arundinacea
gagagcatcaacctaaaacccacgcgatcgaacacccctagaaaaaaaaacaaaaacaaaaagattacagttcctggtttgagtatcaatcgatggtgggcttcgctaagatcgccatggagtggctccaagaaccactgagctggctgttcatcgcctccgtggttttcgtggttctgcagcggcggcggcggggcaacgtggcgccgtttcccccgggcccgaagccgctgccgatcgtcggcaacatgtcgatgatggaccagctgacccaccgtggcctggcggcgctcgcgaaggagtacggcggccttctccacatccggctcgggaagctccatgcctttgccgtgtcgacgccggaatatgcccgggaggtgctgcaggtgcaggacggcgccttctcgaaccgtcccgcgaccatcgccatcgcttacctcacctacgaccgagccgacatggcgttcgcgcactacgggcccttctggcgccagatgcgcaagctgtgcgtgatgaagctcttcagccggcgccggccggagacgtggctcgccgtgcgcgacgagtccgcggcgctcgtccgcgccgtggccaggcggagcggcgagtccgtggacctcggcgagctcatttttaaactcaccaagaatgtcatcttccgcgccgcgttcggcgctggtgcggtcgccggcgacggcgacggcgacggagcagggaagcaggacgagttcatcgccatcctccaggagttctccaagctcttcggcgccttcaacatcggagacttcatcccgtggctgagctgggcggacccgcagggcatcaacgtgcgcctccgcgccgcgcgcgccgccctcgacgagttcatcgacaagatcatcgacgagcacatggagaggggcaagaatcccgacgacgccgacgccgacatggtggacgacatgctcgcgttcctcccggagacgaagccgaagaagggcgccgccggcgacggcgtggacgacctgcagaacacgctccgcctcacccgtgacaacatcaaggccatcatcatggacgtgatgtttggcgggacggagacggtggcgtcggcgatcgagtgggcgatggcggagatgatgcacagccccggcgacctccgccgcctgcagcaggagctcgccgacgtcgtggggctcgaccggaacgtggacgagtcggacctcgacaagctccccttcctcaagtgcgtcatcaaggagacgctccggctgcacccgcccatcccgctgctcctccacgagaccgccgaggactgcatcgtcggcggctactccgtgccccggggttcccgcgtcatgatcaacgtctacgccatcggccgcgaccgcaaggcgtggaaggacgccgacgtgttccggccgtcgcggttcgtgcagggggaaggggaggccgccgggctcgacttcaaggggggatgcttcgagttcttgccctttgggtccggccgccgctcctgccctggcatggcgctcggcctgtacgcactggagctcgccgtggcgcagctcgcgcacgggttcagctgggagctgcccgacgggatgaagccgtcggagctggacatgagcgacgtcttcggcctcaccgcgccgcgcgccaccaggctcttcgccgtgcccacgccccgcctcgcatgcacccagctgctgggggctgacgacgccgggcgtcaggcgtgacgtcgtcgtgcgcgcgcgcggccattgttgtgttagcaagcgatcgatggtatatgtaccagctggaagatgaaggtgtttgatatattcagaggtgatggcggcggcgccattggtggagcttggtggttttctcttgctttttttacaactgttgttttactttgaactcaattaagtctggtcacaacagaacacaataagcggattatcatgctcgctggatgcatgcttaggatacagttaagcatggcgtgttctaccatcaagaccgcaaattgtataaaaagtttttagacctgctgcaccgcaaattgtataaaaaaaaaa

SEQ ID NO: 46 - DNA, 2461 bp, Lolium perenne
ggttctttgcaacgatcaacactgtcagaatccagatacacacacacacacacacacaccaagcagcgtctagctagcttacttgctctagtagttctttgcaaatatccatggagtccgagaacgttgccgccaacggcgatggcctgtgcgtggcacagccggctcgcgccgaccctctgaactggggaaaagcagccgaggagctgtctgggagccatcttgatgccgtgaagcgaatggtggaggagtaccgccgccctgtggtgaccatggaaggcgccagcctgactatcgccatggtcgctgcggtggctgccggcgccgacaccagggtggagctcgacgagtccgcccgcggacgcgtcaaggagagcagcgactgggtcatgaacagcatggccaacggcaccgacagctacggtgtcaccaccggcttcggtgccacctcccaccggaggaccaaggagggtggcgctctccagagagagctcatcaggtttctcaatgcgggagcattcggcaccggcagcgatggccacgttctgcccgctgcgacgacgagggctgccatgcttgtccgtgtcaacaccctgctccagggctactctggtatccgctttgagatcctcgagacggtcgccacgcttctcaacgccaacgtgacaccgtgcctaccgctccggggcacgatcacggcatccggtgacctcgttccgctgtcctacatcgcgggccttgtgaccggccgcccaaattctgtggcgactgctccggatggcacgaaggttaacgctgcagaggcattcaaaatcgcgggcatccagcacggtttctttgagctgcagcctaaggaaggccttgccatggtcaacggcaccgcggtgggctccggactggcgtccatggtgctcttcgaggctaacatccttggcatcctcgctgaggttctgtcggctgtgttctgtgaggtcatgaacggcaagccagagtacaccgaccacctcacgcacaagttgaagcaccaccctggtcagattgaggccgcggctatcatggagcacatccttgaaggaagctcctacatgatgctcgcgaagaagctcggcgagctcgacccactgatgaagccgaagcaagataggtatgcccttcgaacatcaccgcaatggctgggccctcagattgaggttatccgtgccgccaccaagtccatcgagcgcgagatcaactccgtcaacgacaacccgctcatcgacgtctctcgaggcaaggccatccatggtggcaacttccagggcacacccatcggtgtgtccatggataacaccaggcttgccattgctgcgatcggcaagctcatgtttgcccagttctctgagctagtgaacgacttctacaacaatggtttgccttccaatctctcgggtgggcgcaacccgagcttggactatggcttcaagggtgctgagattgccatggcctcctattgctccgagctccaattcttgggcaaccctgtgactaaccatgtgcagagtgcggagcagcacaaccaagacgtcaactctcttggtctcatctctgctaggaagacctctgaggccatcgatattctgaagctcatgtcatcgacattcttggttgcactgtgccaagctatcgacctccgccacctcgaggagaatgtcaagaatgccgtcaagaactgtgtgaagatggtggctaggaagaccctgagcaccaatgacagtggccatctccacagcgcacgcttctgcgagaaggacctgctcttgacgatcgaccgcgaggcggtgttcgcctacgcagacgacccttgcagcgctaactacccactgatgcagaagatgcgtgcagttctcgtggagcacgccttggccaacggtgaggctgagcgggatgtgcagacgtcagtgttcgccaagcttgccgcattcgagcaggagctccgtgcagtgcttccaagggaggtcgagtcagcccggtgtgctgtggagaatggcaccgccgcgcagcaaaaccgcatcaccgaatgccggtcgtacccgctgtaccgcttcgtgcgcaaggagctcggaaccgagtacttgaccggagagaagacgaggtctcctggtgaagaggtggacaaggtgtttgtggctatgaaccaggggaaacacatcgacgcactgcttgagtgcctcaaggagtggaacggtgagcccctgcctatctgctgaagaatgaatcaaggaactgaagaatagagtacttgagagttcagaaggctccacatgtgcttagttaatagtaagtatagtactgttttttcattgtatcttgtgcattatatatacatgtaacactggaataaaatttcaaaaaatcagatcactcaatgggcagcatgtaacactggaataaaaatttcaaaaaaatcagatcaaaaaaaaaa

SEQ ID NO: 47 - DNA, 2596 bp, Festuca arundinacea
gctcctctgtaattcgagctcctcttcagcacaagtacttccaccagagtgccagacaacaatccagcaccacttccagaatacatacacacacgtacccgtgtctaaaccttacttgctttcctagttctttgcatatctccatggagtgcgagaacgggcacgttgccgccaacggcgatggcctctgcgtggcgcagccagcccgggccgaccctctcaactgggggaaggcagcagaggagctgtccgggagccatttggatgccgtgaagcggatggtcgaagagtaccgcagaccagtcgtgaccatggagggcgccagcttgaccattgctatggtcgccgcggtggccgccggcgccgacacccgggtggagctcgacgagtccgcccgcggacgcgtcaaggagagcagcgactgggtcatgaacagcatggcgaacggtaccgacagctatggtgtcaccaccggcttcggcgccacctcacaccggaggaccaaggagggtggcgctctgcagagagagctcatcaggttccttaacgcgggagcatttggcaccggcagcgatggccatgttttgcccgctgcaacaaccagggcggccatgctcgtccgtgtcaacactctgctccaggggtactctggcatccgcttcgaaattctcgagacgatcgccacgcttctcaatgccaacgtgacgccgtgcctaccgtaccggggcacaatcacggcatccggcgacctcgtcccattatcctacatcgccggccttgtgactggccgcccaaactctgtggcgacagctccagatggcagcaaggttaacgcagcagaggctttcaagattgccggcatccagcatggcttctttgagctgcagcccaaggaaggccttgccatggtcaacggcactgccgtgggctccgggctcgcgtccatagtgcttttcgaagctaacatccttggcatccttgccgaggttctatcggccgtgttctgcgaggtgatgaatggcaagccggagtacaccgaccacctaacacacaagctgaagcaccacccgggccagatcgaggccgcggccatcatggagcacatccttgaaggcagctcctacatgatgctcgcgaagaagctcggtgagctcgacccactgatgaagccaaaacaagataggtatgcactccgcacatcaccacaatggctcggccctcagatcgaggtcatccgtgctgctaccaagtccatcgagcgtgagatcaactccgtcaacgacaacccactcatcgacgtctcccgcggcaaggctatccacggtggcaacttccagggcacgcccatcggtgtgtccatggacaacaccaggcttgccattgcggccatcggcaagctcatgtttgcccagttctcggagcttgtgaacgatttctacaacaacggtttgccttccaatctctctggtgggcgcaatccgagcttggactatggcttcaagggtgctgagattgctatggcctcatactgctccgagctccagttcttgggcaaccctgtgactaaccatgtgcagagcgccgagcagcacaatcaagacgtcaactctctcggcctcatctcttccaggaagaccgctgaggcgattgacattttgaagctcatgtcctcgacattcatggttgccttgtgccaagctatcgacctccgccacatcgaggagaatgtcaagaatgccgtcaagaactgtgtgaagacggtggctaggaagaccctgagcaccaatgacagtgggcatctccacaatgcacgcttctgcgagaaggacctgctcctgacgatcgaccgtgaggcggtgttcgcctacgcagatgacccttgcagcgccaactacccgctgatgcagaagatgcgtgcggttctcgtggagcatgccttggccaacggtgaagccgagcaggacgtgcagacgtcagtgttcgccaagcttgccacattcgagcaagagctccgtgcggttcttcccaaggaggtcgagtctgcccggtgttccgtggagaacggcaccgccgcacagcagaaccgcatcagcgaatgccggtcatacccgctctatcgcttcgtgcgcaaggagctcgggactgagtatttgaccggagagaagacgaggtctcctggtgaagaggtggacaaggtgtttgttgctatgaaccagggtaagcacattgacgcgctgcttgagtgcctcaaggagtggaacggtgagcccctgcctatctgctgaagaatggctcaaggaactcaagaatagagtgcttgagaattcagatggtactgttttataattatatctccggatatcgatgtttgcaatgttcctccagagctgcaatgccagttagaaaagataatagcatgacttggtagtgttgtttagcctagaaattttctatgatgttagttagtaaaagggtacactttgtgataaatatacataattattgcactagtcctttatttttatatcaatgttctgtctactgaggcaactttgaaggattcaaagaatctagtattggcctgccaaaaaaaaaa

SEQ ID NO: 48 - DNA, 1301 bp, Festuca arundinacea
ggtcccttgtatcagctgatcatggctttttccggcagcgtcagcggcgttgttctcgtcgtggcgatcctgcttctgggtctggccgcggcggcgtcggcacagctgtcggcgacgttctacgacgcgtcctgcccgagcgcgctcgcgacgatcaagagcgccgtgacggcggcggtgaacaacgaggcccgcatgggagcctccctgctcaggctccacttccacgactgtttcgtccaaggatgcgacgcgtcggtgctcctcaacgacaccgccaacttcaccggcgagcagacggccttccccaaccgcaactccatcaggggactcaacgtcatcgacaacgtcaaggcgcaggtcgaggccgtatgcacgcagaccgtctcctgcgccgacatcctcgccgtcgccgcccgcgactccatcgtcgccctaggagggccgtcgtacacggttccgctggggaggagggactccaccaccgcgagcctgtccgaggcgaacagggacctcccgccgccgtcctccgacctcgccgatctcgtcggcaacttctccaggaaaggcctcagcgtcaccgacatggttgcgctctcaggagcccacacgatcgggcgggcggcatgcttaaacttccggagccggatctacggcgagtccaacatcgccccggcgtacgcggcgtcgctgcaggccaactgcccgcagtccgcccccaatggcgacggtacactcgcaccgctcgacgtgtccacccccgacgccttcgacaacgcctactacggcaacctgctctcgcagcaggggctcctccactcggaccagcagctcttcaacggcggctcgaccgactccctcgtcagcacctacgcctccaacgccgcgcagttcagcggcgacttcgccgcggccatggtgaacatgggcaacatcggcgtgctcaccggcgcccagggggagatccggctcaattgtggcaaggtgaattgagtgaaagcccgacaactgagactgcaggtgaaagtggatggggcacatgcaattgcgaagctgggctggtagctttactgaaaccgaataaggtgtcaacgtgaaggccatattgatgtgcttattgggcctatcttggaattccttacagggattcagattcagtcatttctccttcgcatggtctatttgtttcccacagaaaataaggatataataatactgtataatcctgtaaaaaaaggaaacgatactgtatagttgtgcctatcaacaaccacatttctggttgaaagctaaaaaaaaaa

SEQ ID NO: 49 - DNA, 1236 bp, Lolium perenne
gagatggcttcttcttcctcccccttttctcgggtctcccagctagccgtcaaggcgacggtcctggcggccgtctgcctcctcctccacggcggaggcgggagtagcgcatcggcggcggagctgtgcgtgagctactacgaccacacgtgtccggacgcgtacaagatcgtgcagggggtgctggtggaggctcacaagtcggacccgcgcatcttcgccagcctcatccgcctccatttccacgactgcttcgtgctgggctgcgacggctcgctgctgctggacaccttccccggcttccagtccgagaaggacgcgcgccccaacaacaactcggcgcgcggctaccccgtcgtcgacgccgccaaggccgctctcgagaaggcgtgccccggagtcgtctcctgcgccgacatcctcgccctcgccgccgagatctccgtccagctgtccggaggacccgggtggggcgtgttgctggggaggctggacggtaagacctccagcatagccggcgcccagaacctacccggcccgttcgacggcctcaagaatctcacccttaagttccaagccgtcaatctcgacgttactgacctcgtcgctctctcaggtgctcacactttcggtcgcgtgaaatgccggttcgtcacgaaccgtctgtacaacttcagcgggacgaaccagcctgacccgaccctaaatgcggcttaccgggcgttcctgtcaacgagatgcccaaggaacggcgatgcaaactctctaaatgaccttgatccgacgacgcccgacacctttgacaagaactacttcacgaacctcgagaaaaatcgcggctttcttgactctgaccaacaactcaaatcagacccaggtgcattaacgacgacggcgccgattgtcgataggtttgcaagcagccaggacgcattctttaagagcttcgcatggtctatgatcaagatgggaaacattctgccaattacagatccctcccgtggagaagtccggaaacactgcgcgtttgtcaattgatgttaattagcaagaaggccacatgtggatacaactacggcctatgctatatgcgcaaaatcatggatctcattgtcatgttcaataattggtaatatatatgccaaccaatgtacgtaagattatgtgcatgctttgatcccacaagtgcaatgaagtgaaatcttatttcccgtttgaggttgatcaaaaaaaaaa

SEQ ID NO: 50 - DNA, 1205 bp, Festuca arundinacea
gcaagcttccctcgattagctaccttgtctagccaccgtcgtccttgcacagccaaggaagaagcaaagctatttggcttctaacaatggcgacgaggggtgtcatggtggcgctgctgctcgcggcggtggcggcgtcttgcgctcatgcacagctgcacgagaagttctacagtgagtcgtgccccagcgtggaggacgtcgtccggaaggagatggtcatggcgctatccctcgcgccaagcctcgccgcgccgctcctcaggatgcacttccacgactgcttcgtcagggggtgcgacggctcggttctgctggactcggcgaacaagacggcggagaaggacgcgctgcccaaccagacgctgcgcggcttcgacttcgtcgagagggtgaaggccgccgtggagaaggcctgccccgacaccgtctcctgcgccgacgtggtcacgctcatagccagggacgctgtctggctgagcaaaggcccattctgggaagttcctttgggccggcgagacggcagcgtgtccatctccaacgagaccgacgcgctgccccctcccaccgccaacatcaccgtgctcacccagctcttcgccgccaagaaccttgacatcaaggacctcgtcgtcctctctgccgcgcacacgatcgggacatcgcactgcttctccttctccgaccggctctacaacttcacgggcctcgacaacgccagcgacatcgaccccacccttgaacctttctacatggcaaagctgaagagcaagtgcaccagtctcgacgacaacagcacgctcgtggaaatggaccccgggagcttcaagaccttcgacctcgactacttcaagctcgtcagcaagcggaggggcctcttccactccgacggtgccctcctcaccgacgccttcacccgtgcctacatcctgcgccacgccaccggcgccttcaaggacgagttcttcgccgactttgccgtctccatggtaaagatgggcaacaccgacgtgctcactggaagccagggcgagatcaggaagaagtgctccgtggtgaaccattagttagccgtggaagtaccggttggcataccaacccttttgatttgtgaccatgttttttttctgtgtagattattactgtaaaaccgttacttcattttcctctccccaagttcttttcttcgttggttaaaaaaaaaa

SEQ ID NO: 51 - DNA, 1382 bp, Lolium perenne
ggccacaactcgccacatttggcatagcgagcactgacagcgagctacatccatcaccatggcttctagccgtgtcctgctcctcgtcgtggcagctctggcgatctccgtgtccgccacggccgcggccaccaagatcagtgctccactaccgccgctggccaagggcctgaacttcgatttctacaaggccacctgcccgcaggccgagtccatcgtcttcaacttcctccgcgacgccatccgcaaggacgtcggcctcgccgccgcgctcctccgcatccacttccacgactgcttcgtgcagggctgcgacggctccgtgctcctcgacaagaccggcggcaccgacagcgagaagatcgcaccacccaacgtcacgctccgccccaccgccttcaaggccatcaacgacctccgcgctctcctcgccaaggcctgcggcgccgtcgtctcctgcgccgacatcgccgccctggccgcgcgcgactccgtgcacctcgccggcgggccgcactaccccgtcccgctcggccgccgcgacgggctcgcccccgcgaacctcaccaccatcctcaacgccctcccggcaccgagctccaacgtcaccaccctcctcagattcctcgccaagatcagcctcgacgccaacgacctcgtcgcgctatccggcgcgcacacgctcggcatcgcgcactgcacctccttccaggagcgcctcttcccgcagaacgacgtcaccctcaacaagtggttcgcgtcgcagctcaggctcacctgcccggcgctcaacaccgacaacaccaccaacaacgacatccgcacccccaacgtcttcgacaacaagtactacgtcgacctgctcaaccgccagggactcttcacctccgaccaggacctgcacaccgacgccaggaccaagcccaccgtcaccaggttcgccgtcgaccaggccgcctttttcgaccagttcgtcttctccgtcgtcaagatgggccagatcaacgtgctcaccggcagccagggacagatacgcaacgactgctccgcgcccaacaaaggccgcaccaacgacgacctgccgtggtccgtgctcgagaccgtcaccgaggccgcccagagcttggtgttgtagatatgcgctgtggataggttggttcagtcgatccatctctagcctacgtactttcttcccaaagttgtagctttattagcgagccgtgtggtaatggtttgggctttgagagccacagttgatgcatgtgtgtttagtttcttgagcaactcgaccagtttaataatcacgagatggtttttggtgtgtcgaatgacgactagaaaattgagatgaatatttgatgttattttcaataaaaaaaaaa

SEQ ID NO: 52 - DNA, 1261 bp, Lolium perenne
gatcgcctttctcctccatgaccaccatgggcggctcgtcgatcctgcccgcgccgaccgtggcgacgacggcgctggttctgctgatcgtgctgttcgcatcgccggcaacggtggcgaaaggttctgggctgtccgtcgggttctacaagaagttgtgtccgaaggcggagaaggtcgtccggcgaactgtcaccaaggcctttgagaaggagcctggcaccccggccgacatcatccgcctcttctttcacgactgctttgtccgagggtgcgacgcatcggtgctgctggaatccacgccagggcgcatggcggagagggactcgaaggcaaacaaccccagcttggatgggtttgaggtcattagcgacgccaaggagacccttgagaagctctgcccgcaaaccgtctcctgtgctgacattctcgccctcgccgcccgcgatggcgcctacctcgctagcgggctcgactatgcggtgcccaccggccgccgtgatggcctcgtctccaaggaagacgaggttctccctagtgtccctcaccccgacttcaaccattctcagctcgtggaaaacttcacggcaaaaggctttacggcggaggagatggtgacgctgtcgggggcgcacaccatcggcacctcgcactgctcgtccttcacggaccgcctctacaacttctcccagggcggcgcgctgaccacggaccctgcgctgccggcggcatacgccgcgctgctgaaggagaagtgcccgccggagacagcggcgcagaacgacaccaccatggtgcagctcgacgacgtgacgccgttcgtgatggacaaccagtactacaagaacctgcttgccggcaccgtgccgctcggctccgacgtagcgctcatggagagccccgacacggcggcgctcgtcgagctctacgcccgcgagcccgccgagtactgggccaagcgcttcgttgcggcgatggtcaaggtgagcgagatggaggtgctcaccggggccgagggggagatccggctcaactgctccaaggtgaactagtatataaccggttgctgcgtttgtctctgtactatatgtttgggaaagatgacgatacacgttcttcttttgtgttaatgttttttctttcatttgttttcatatggtggtgagaaatatatacacatttgtttgcgtcataaactgtaaagcttacacagcatgcataaaagcatctatatcattccatttgagttgtaaaaaaaaaa

SEQ ID NO: 53 - DNA, 1059 bp, Lolium perenne
acgagggagaactactacgggtcttcttgtcccaccgcgcttctcaccatcaggactgtcgtgacgacggcggtgctgctggaccaccgcatgggcgcttctcttctccggctccacttccacgactgctttgtgcaagggtgcgacgcgtccgttctgctggatgacacggccggcttcaccggcgagaagggggccgggccgaacgccgggtcgctgcgcggtctggaggtgatcgacaagatcaagatgctgctggagttcatgtgcccgcggaccgtctcctgcgccgacatcctcgccgtcgccgcccgcgactccgtcgtccgtctaggggggccatcatgggcggttcaacttggaaggagggacgccaccacagcaagcgcgtcacttgctagtagtgacctcccaggccccaactccaacctcaatgatctcctcaccgctttctccaaaaaaggactaagcaccacggacatggttgctctatcaggggcccataccatcggccgggcgcagtgccagaactaccggaaccggatctacaccgacaccgacattgacggggcattcgcagcgtccctgcgaggcggctgcccacaggccggcggcgacggcaacctcgcgccgctcgacgcgtcctctcccaacaccttcgataacggctacttctccggcctcctctcccgccaggggctgctccattccgaccaggcgctgtacgacggcggctccacggacgatctggtcaggacctacgcctccaataacgatcagtttggcagcgacttcgctgcggcgatggtgaaactgagcaatatcggcctgctgacggggtcgtccggggagatcagggtcaactgccgggcggtgaattaacgatggatggatgggggcatcatgaaacgaacaaggcgtgcgatttccggaactgcaggcaacgaaactgcatatttatgtacactgcctatttatttcctgtccttgtgtccccgtcttgttatattacatccataatccatgttaagatggtggcattggtttaaaaaaaaaaaa

SEQ ID NO: 54 - DNA, 1266 bp, Festuca arundinacea
ggccagataacaagtgcaggcagcaaaccagttacaggcacgccgcaatatagcttgggtcttgtagctagccatagccatggcatctgcctcttgcatttctttggtgttgctggtggctctggccgccacggcggcgtcggcgcagctgtcgtcaacgttctatgacacgtcgtgccccagggccctggccaccatcaagagcggcgtggcggccgccgtgagcagcaacccccgcatgggtgcgtcgctgctcaggctgcacttccacgactgctttgttaatggctgtgacgcgtccgttctgctgtcgggcaacgagcagaacgcgcccgcgaacgccggttcgctgtttggcttcggcgtcatcgacaacatcaagacccagctcgagggtatctgcaagcagaccgtctcctgcgccgacatcctcaccgtcgccgcccgtgactctgtcgtcgccctcggaggcccgtcatggacagttcctctcggcagacgggactcgacgagcgcaaccggcaataccggggacctcccgggccctggatccagcctcgcacagctccaggccgcgttcgccaagaagaacctgaacaccgtggacatggtagcgctctccggcgcgcacaccatcgggcgggcgcagtgccagaacttccggtcgcggatctacggcggcgactctaacatcaacgccgccttcgcgacctcgctcaaggccaactgcccgcagtccggcggcaacggcaacctggcggcgctggacgccacgaccgccaacgccttcgacaacgcctactacaccaacctgctctcccagaaggggctcctccactccgaccaggtgctcttcaacaacggcagcaccgacaacaccgtcaggaacttcgcgtccagcggggcggcgttcagcagcgccttcgcgacggcgatgatcaagatgggcaacatctcgccgctgacagggacgcaggggcagatcaggctcagctgctccaaggtgaactcgtgattagcgtacgaggagccgacagacagtcgccagcactatacgtcacgtgaatgaataaggccacagaaccggcggccaatccacagtactattagcagttcagcactagctagaaccgtgtatatatatacgtgcagctcaaaattattcatgcacctctacacatgtaactatcgaattctctcatgcaaaggcataaagaattacttcaatatatacaactacaactaccattattctcaaaaaaaaaa

SEQ ID NO: 55 - DNA, 1164 bp, Lolium perenne
gctagctccccggcgctaccttcgccttccgctccccctctccggccttgcgccctctgccgccaagtcgcctggcttggccggtcggcactcccctcatcccctggctcacccctcccctcaggctcctcttcctctcccctggccctggaggcagtcggtcggatctggccggtcgccggagacgcgctcggccgtccactgctcgccgccgctgccttctagccactaccgttcagcctccagagccaagcggcagtctagcccaacagcaggagcgtagaatagtgttacctcttgtttcattattcaatatacaaaatggccgtgtcggagcttgaggtcgacggcgtcgtcttcccgccgctggcccgtccgccgggcacagcccacgcgcacttcctcgccggcgcaggtgtgcgagggatggagctcggcggcaacttcatcaagttcacggccatcggcgtgtacctgcaggccgacgccgccgtgtccgcgctcgccacgaagtgggccgggaaacccgccgacgagcttgctgcagacaacgccttcttccgcgacgtcgtcacaggcgagttcgagaagttcacgccggtgaccatgatcctgccgctcaccggcgcgcagtactccgagaaggtgaccgagaactgcgtcgcgtactggaaggccgtcggcaagtacacgaacgccgaggccgccgccgtcgacaagttcaaggaggccttcaggactgagagcttccctcccggcgcgtccatcctcttcacccactcccccgccggcgtcctcaccgtcgcgttctcgaaggactcgtcggtaccagagtcgggcggcgtggcgatcgagaacaggccgctctgcgaggccgtgctggagtccatcatcggcgagcacggggtctcgccggcggcgaagctcagcctggcgaccagggtcgccgagctcctgaatgaggccgcccccgtcggccaagcggcggcagagcccgtgtcggtttctgcgtgaacggaccggacaccgtcactgctggcttgtgtggttggcgatgtccgttgttgagacgtcgtgttccggagtttctaccgttgttttctgttgtgtcgaggtgaaccgtgctaacttgaataaagaaaccgctgcccaagaaaaaaaaaa

SEQ ID NO: 56 - DNA, 933 bp, Festuca arundinacea
gtgcacacacagctacccatccaatccacccctgtctccggccgcgcgcgcatcgatctcataccatcggccgtctcggagcttgaggtcgacggcgtcgtcttcccgccgctggcccgtccgccgggcacagcccacgcgcacttcctcgccggcgcaggtgtgcgagggatggagctcggcggcaacttcatcaagttcacggccatcggcgtgtacctgcaggccgacgccgccgtgtccgcgctcgccgcgaagtgggccgggaaacccgccgacgagcttgccgcagacaacgccttcttccgcgacgtcgtcacgggcgagttcgagaagttcaggcgggtgaccatgatcctgccgctcaccggcgcgcagtactccgagaaggtgaccgagaactgcgtcgcctactggaaggccgtcggcaagtacacggacgctgaggccgccgccgtcgacaagttcaaggaggccttcaaggccgagagtttccctcccggcgcgtccatcctctttacccactcccccgccggcgtcctcaccgtcgcgttctcgaaagactcgtcgttgccggagtcgggcggcgtggcgatagagaacaggccgctctgcgaggccgtgctgaagtccatcatcggcaagcatggggtctcgccggccgcgaagctcagcctggcgaccagggtcgccgagctcctgaaggaggccgcacccgtcggcgagccggcggtggcagagcccgtgtcggtttcagcatgaacggactgggcaccgtcactgctggcttatacatgtggttggtgatgtccgtgttgagacatcgtgttccggagcttctaccgttgtttctcttgcgtccaggtcaaccgtgctaacttgaataaagaaaccccagccattgaaatttatttacatcaaataaaaaaaaaa

SEQ ID NO: 57 - DNA, 1531 bp, Lolium perenne
gactcattcatctgtcgtctcctgcttccctcaagcttagatcgattgcagccggccggggactgtcgagctaccactgccggtcgctggtacgagcggacgtaaggagagatccagatggccgcgacgatgaccgtggaggaggtgaggaaggcacagcgggcggaggggccggcgacggtgctggccatcggcacggcgacgcccgctaactgtgtctaccaggctgactacccggactactacttcaagatcaccaagagcgaccacctcgccgatctcaaggagaagttcaagaggatgtgcgacaagtctcagatcaggaagaggtacatgcacctgacggaggagatcctggaggagaaccccaacatgtgcgcgtacatggcgccgtcgctggacgcgcgccaggacatagttgtcgtcgaggtcccgaagctcgggaaggcggcggcacagaaggcgatcaaggagtggggccagccgcggtccaagatcacccacctcgtcttctgcactacctctggtgtggacatgccaggcgccgactaccagctcaccaagatgctcggcctgcgcccgtcggtgaagcgcctcatgatgtaccagcagggctgcttcgccggcggcacggtgctccgcctcgccaaggacctggctgaaaacaaccgcggcgcgcgcgtgctggtggtctgctcggagatcacggccgtgaccttccgcggcccgcacgagtcacacctcgactcgctggtcggccaggcgctcttcggggacggcgctgccgcggtgataatcggcgccgaccccgacgtgtccgtcgagcgcccgctgttccagctggtgtcggcgagccagaccatcctgccggactcggagggcgccatcgacggccacctcagggaggtcggcctcaccttccacctcctcaaggacgtgcccgggctcatctccaagaacatcgagcgcgccctggaggaagccttcaagccgctcggcatcgacgactggaactccgtcttttgggtggcgcacccgggcgggccggcgatcctcgacatggtggaggcaaaggtaaacctcaacaaggagcggatgcgtgccaccaggcacgtcctctccgagtacggcaacatgtccagcgcatgcgtcctcttcatcatggacgagatgcgcaagcgctctgccgaggatggtcacaccaccaccggcgagggaatggattggggcgtcctctttggcttcgggcccggcctcaccgtcgagaccgttgtcctccacagcatgcccattgccgctgatgccaccgcttgatcgatggttccatctccgtttatctgccacatcgatggatacctactactactaccgccgccgccgctgctatccaaagtaatttgtattgtattcatgcatacctggtttgtatttgttggtaggattcgttccgctattatgtcgcttgtgtcgcgtacactgttgtatcctagtaatagtaatcaaacggagtacggtttatgtaaaaaaaaaa

SEQ ID NO: 58 - DNA, 774 bp, Festuca arundinacea
acagatgtacttcgtgtccaagtccctggcggagaacgccgccatggactacgccaaagagaacggcgtggacttcatcagcatcatccccacgctcgtcgtcggccccttcctcagcgccggcatgccgcccagcctggtcaccgccctggcactcatcacggggaacgaggcccactactcgatcctgaagcaggtgcagctggtccacctggacgacctctgcgactccatgacctacctcttcgagcacccggacgccaacggccgctacatctgctcctcccacgacaccaccattcatggcatcgccaggatgctcaaggagaggttccccgagtacgacatcccacagaaattcccgggagccgacgacgaccttcagccgatccacttcttcttcaagaagctgctcgaccacgggttcaggttcaggtacaccgccgaggacatgttcgacgccgcggtctggacgtgcagggagaagggcctgattccgctcggagcggaaggggcaggcggcccggccagtgcagccggcaagctgggagctgttctcgtgggcgaaggtcaggcgattggtgctgagacataagcgctagtgcatgtacactaggctggctacctcagacacatggtggagcgatgattatgttcgttaattctactatcctatatttcggttcagaaattgcattaagagaaccctgtaattggtgggatattatgaacggattatggaacgcaaataacttcatgacggaaaaaaaaaaa

SEQ ID NO: 59 - DNA, 1211 bp, Lolium perenne
gggagcaccacacatggcgactgaagccaagggggagacggtgctggtcaccggcgccagcggcttcatcggctcctggctcgtccgcctcctcctcgcccgcggctactccgtccacgccgccgtcctcaaccccgatgacaaggccgagacggaccacctcctcgcgctcgccgctgcggccggcgacgagggccgcatccgcttcttcaggtgcgacctcctcgacggcgccgccatgctcgccgccgtgcggggatgctccggcgtgttccacctcgcctctccctgcaccgtcaacctcgtcctcaacccccaaaaggagcttgtggtgccggcggtggagggcacgctcaacgtgctgcgcgccgccaaggaagctgggggagtgcggcgggtggtggtgacctcctccgtctccgccctcgtcccctgcccggggtggccggccggcgaggtcctcgacgagcgctgctggaccgacatcgactactgcgacaagaacggggtttggtaccctgcttcaaaggcactggcggagaaggcggcatggaagtttgcagaggagaatggactggatgtggtgacggtcaatccagggacggttttgggcgagatgattccgccaaggctcaatgccagcatggccatgtttcttcgcttacttgaaggttgcaaagaggagtatgcagatttcttcatcgggccagtgcacgtggaagacgttgcattagcccatattctgctgtacgagaatccgtcagcatccgggaggcacctctgcgtggagcccatctgtcactggagtgttttcgcggcgaaagtcgccgagctctaccctgattacaaagttccaaaattccctgaggacacacagcctgggctggtgagggcgaaggcggtgccaaaaaagctgatggcgttgggtttgcagttcactcctcttgagaagatcatcagggatgccgtggagagcctcaagagcagaggatgcatcgcctgatgattggatcgttaggcatgtcacccttccgtcgtaggttcatgatcatccttgttgaaaaatgtgttgtgttgtgtccagcccagtgcctacccagaccatatacttaccagtatgatttgtgcaataacagccggttgatgtacggcatcacctgccctacacttgggatgcggatgctgtcacactgactccctcaaaaaaaaaa

SEQ ID NO: 60 - DNA, 1229 bp, Lolium perenne
ggctcaaccaagggcaaagtgtgtgtaactggggcttcaggctttgttgcctcttggctcatcaagaaactccttgagtctggatatcatgtgatagggactgtcagagacccagggaatcgaagaaaggtgggacacctttggaaactaccaggtgcaaatgagaggctccaacttgtgagagctgatctattggaggaagggagctttgacgatgctgtaagggcttgtgagggtgtcttccacattgcgtcgcctgtccttgggaaatctgattccaattgcaaggaagcaacactcggtcctgcaatcaatggtaccctcaacgtgctaagatcctgcaagaagagtccatttctcaaaagggttgttctcacatcttcatcatccgcggtaaggattagggatgaaactcagcagccagaactgttatgggatgaaacgacatggagctctgtgccactctgtgaaaagctacagctatggtatgccctggcaaaggtatttgcagagaaagcagcattggactttgccaaggagaataacattgaccttgtgacagttcttccatcattcgtaattggacccagtttatcccatgaattgtgcactactgcttcagatatccttggcttacttcaaggtgacacagacaggttcactttgtacggaaggatgggatatgttcacatcgatgatgttgcccggagccacattctagtgtacgaaacaccggaggcaactggcagatatctgtgcagctcagtggttctggataacaatgaattggttggcttactggcaaaacagtttccagtattccccattccaaggaggctcaagaacccctatggaaagcaggcataccagctagacacatccaagctccaggggctgggtctcaagttcaaaggagtgcaggagatgtttaacgactgcgtcgaatcgctgaaagatcagggccatttgctggagtgcccgttgtgataacagagacagcattgacaagccatagccaaacagcattgacaagccatagccaaacacatctcaactatgcctgaatcatgtcagttctcgagtcatagattttttttttctcttcaaataattcccatgtactctccttactataccgaacatcaattgtcagcggcagattaaatgtgtccatatgctttgcaattgtttcaattagtaatgaaatatttgaaacaaaaaaaaaaaaa

SEQ ID NO: 61 - DNA, 1439 bp, Lolium perenne
aaacgactccaacgcaccgatcgacgacacacccctgcacttcacgggtcgatcggatcggaggatggcgccggtggtggagagagcgcccttcctgccgacgggggaggccacgctgcggccgtccttcgtgcgggacgaggacgagcggcccaaggtggcgcacgaccgcttcagcgacgaggtgcccgtcatctcgctccacggcatcgacgacgcgcggaggaccgagatccgggaccgcgtggcggcggcgtgcgaggggtggggcatcttccaggtcgtcgaccacggcgtcgacgccgcgctcatcgccgagatggccaggctctcgcgcgacttcttcgcgctccccgccgaggacaagctccgctacgacatgtccggcggcaagaagggcggattcatcgtctccagccacctccagggcgagacggtccaggactggcgggagatcgtgacctacttctcgtacccggtcaaggcgcgggactacggccggtggccggacaagcccgcggggtggcgcgcggtggtggagcagtacagcgagcggctcatggcgctgtcctgcaagctgctgggggtgctgtcggaggccatgggcctggagacggaggccctgtccaaggcgtgcgtggacatggaccagaaggtggtggtcaacttctaccccaagtgcccccagcccgacctcaccctcggcctcaagcgccacaccgaccccggcaccatcaccctcctcctccaggacctcgtcggcggactccaggccacccgcgacggcggcaacacctggatcaccgtacagcccatcgccggcgcattcgtcgtcaacctcggcgaccacggccactacttgagcaacgggaggtttaagaacgcggaccaccaggcggtggtgaacggggagagcagcaggctgtccatcgccacgttccagaacccggcgcccgacgccaaggtgtggccgctggcggtgagggagggggaggacaccatcctggaggagcccatcaccttcaccgagatgtaccgccgcaagatggcgcgcgacctcgagctcgccaagcgcaagaagcaggccaaggccgatcagctcaagcagcagctgcagcaggaggccgcgcccgccgccgcgcccaccaagccactcaaccagattcttgcctagattccatgccgattcattcatgcgtgatatatagtactatgtactatatcgtattaaaataagtaattatctctatctactcatttgtgtgtaattaagagatgagtaattatctagtatatacacatttgtctgcgaggagcgagctggacctgtaataacatgtagcatgtcctacgtggaaccgatcagctgattggagctgtcacatgagtttgctgtgtgcagaaattgaacgcattcggtactgctttcaaaaaaaaaa

SEQ ID NO: 62 - DNA, 1320 bp, Festuca arundinacea
gaaacggccctgcactagacgaaccagacaaacgactccatcccacagacgactcgccggccgccacgcccacgcaccactttacggggccgatcggatcggatggcgtcggtggagaacgcgccgttcctgccgacggcggcgacgggcgaggccacgctgcggccgtccttcgtgcgggacgaggacgagcgacccaaggtggcgcacgaccgcttcagcgacgaggtgccggtcatctcgctccacggcatcgatgatggcggcgcgcggagggccgagatccgggaccgcgtggcggcggcgtgcgaagggtggggcgtcttccaggtcgtcgaccacggcgtcgacgccgccctcgtcgccgagatggccaggctctcccgcgagttcttcgcactccccgccgaggacaagctccgctacgacatgtccggcggcaagaaaggtggattcatcgtctccagccacctccagggcgagacggtccaggactggcgggagatcgtgacctacttctcgtacccggtgaaggcgcgggactacgggcggtggccggagaagcctgcggggtggcgcgcggtggtggagcagtacagcgagcggctcatggcgctgtcgtgcaagctgctgggggtgctgtcggaagccatgggcctggagacggaggccctgtccaaggcgtgcgtggacatggaccagaaggtggtggtcaacttctaccccaagtgcccccagcccgacctcaccctcgggctcaagcgccacaccgaccccggcaccatcaccctcctcctccaggacctcgtcggcggactccaggccactcgcgacggcggcaacacctggatcaccgtgcagcccgtccccggcgccttcgtcgtcaacctcggcgaccacggccactacttgagcaacgggaggtttaagaacgcggaccaccaggcggtggtcaacggggagagcagcaggctgtccatcgccacgttccagaacccggcgccagaagcgaaggtgtggccgctggcggtaagggagggggaggacaccatactggaggagcccatcaccttcaccgagatgtaccgccgcaagatggcgtgcgacctcgagctcgccaagcgcaagaagcaggccaaggccgaccagctcaagcagcagctgcagcaggagcagcaggaggcggtggccgccgccgcgcccaagcccgccaccaccaagcccctcaaccagattcttgcctagattccatgtatatgtatatcgtattaaaataagaaattatctatatatatatatatatatataaaaaaaaaaaaa

SEQ ID NO: 63 - protein, 654 aa, Lolium perenne
MESSAVVPGTTAPLLPYAYAPLPSSSDDARENRSSGGVRWRACAVVLADSALAVVVVVGLLAGGRVDRVPAGADVASATVPAVPMEFPRSRGKDLGVSEKSSGAYSADGGFPWSNAMLQWQRTGFHFQPEQHYMNDPNGPVYYGGWYHLFYQHNPKGDSWGNIAWAHAVSKDMVNWRHLPLAMVPDQWYDSNGVLTGSITVLPDGQVILLYTGNTDTLAQVQCLATPADPSDPLLREWIKHPANPILFPPPGIGLKDFRDPLTAWFDHSDHTWRTVIGSKDDDGHAGIILSYKTKDFVNYELMPGNMHRGPDGTGMYECIDLYPVGGNSSEMLGGDDSPDVLFVLKESSDDERHDYYALGRFDAVANVWTPIDRDLDLGIGLRYDWGKYYASKSFYDQKKNRRIVWAYIGETDSEQADITKGWANLMTIPRTVELDRKTRTNLIQWPVEEVDTLRRNSTDLGRITVNAGSVIRLPLHQGAQLDIEASFQLNSSDVDAINEADVGYNCSTSGAAVRGALGPFGLLVLANGRTEQTAVYFYVSKGVDGGLQTHFCHDESRSTRAKDVVNRMIGSIVPVLDGETFSVRVLVDHSIVQSFAMGGRITATSRAYPTETIYAAAGVYLFNNATGATVTAERLVVHEMASADNHIFTNDDL

SEQ ID NO: 64 - protein, 648 aa, Festuca arundinacea
MESSAVVPGTTARLLPYAYAPLPSSADDARENQGSDGVRWRACAAVLAASALAVLVVVGLLAGGRVDRPGPAAVPAVPTEIPRSRGKDFGVSEKSSGAYSADGGFPWSNAMLQWQRTGFHFQPEQHYMNDPNGPVYYGGWYHLFYQYNPKGDSWGNIAWAHAVSKDMVNWRHLPLAMVPDQWYDSNGVLTGSITVLPDGRVILLYTGNTDTLAQVQCLAEPADPSDPLLREWIKHPANPILFPPPGIGLKDFRDPLTDWFDHSDDTWRTVIGSKDDDGHAGIILSYKTKDFVNYELMPGNMHRGPDGTGMYECIDLYPVGGNSSEMLGGDDSPDVLFVLKESSDDERHDYYALGRFDAAANIWTPIDQELDLGIGLRYDWGKYYASKSFYDQRKNRRVVWAYIGETDSEQADITKGWANLMTIPRTVELDKKTRTNLIQWPVEEVDTLRRNSTDLGRITVNAGSVIRLPLHQGAQLDIEASFQLNSSDVDALNEADVGYNCSTSGAAVRGALGPFGLLVLANGRTEQTAVYFYVSKGVDGALQTHFCHDESRSTRAKDVVNRMIGSIVPVLDGETFSVRVLLDHSIVQSFAMGGRITATSRAYPTEAIYAAAGVYVFNNATGATVTAERLVVYEMASADNHIFRNDDL

SEQ ID NO: 65 - protein, 620 aa, Festuca arundinacea
MESRAFPNAAYAPLLPPTADDATLGKQDRPGVGWRGFLTVLAASGVVVLLVAATMLAGSRMGQAGDTDEDGAGGFPWSNEMLQWQRAGFHYQPEGHFMSDPDGPVYYRGYYHLFFQYNRRGVAWDDYIEWGHVVSQDLVHWRPLPLALRPDHWYDKKGVLSGTITVLHNGTLVLLYTGVTEDPMAESQCIAVPTDPNDPLLRHWTKHPANPVLAHPQGVQGMDFRDPTSAWFDKSDATWRILIGSKDDDNGSHAGIAFIFKTKDFLSFERVPGIVHRVEGTGMWECIDFYPVGGGHNSSSEELYVIKASMDDERHDYYSLGRYDAAANTWTPLDAELDLGIGLRYDWGKLYAATSFYDPLKQRRIMLGYVGETDSARADVAKGWASLQSIPRTVTLDEKTRTNLLLWPVEEVEALRYNSTDLSGITVDNGSVFHLPLHQATHLDIEASFRLDASDVAAINEADVGYNCSSSGGAAARGAIGPFGLLVHAAGDLRGEQTAVYFYVSRALDGTLRTSFCNDETRSSRARDVTKRVVGSTVPVLHGEALSMRVLVDHSIVQSFAMGGRVTATSRVYPTEAIYARAGVYLFNNATGASVTAERLIVHEMASAVYDETLIMVEDS

SEQ ID NO: 66 - protein, 623 aa, Lolium perenne
MESRAFPSAAYAPLLPSAADDVALAKQDRPGVGWRGFLTVLAACGVVVLLVGATLLAGSRMGQAGDGEGNTDEDGAGGFPWSNEMLQWQRAGFHYQPEGHFMSDPNGPVYYRGYYHLFFQYNRRGVAWDDYIEWGHVVSQDLVHWRPLPLAMRPDHWYDKKGVLSGTITVLHNGTLVLLYTGVTEDPMAESQCIAVPTDPNDPLLRHWTKHPANPVLAHPQGVQGMDFRDPTSAWWDKSDATWRILIGSKDDDNGSHAGIAFIFKTKDFLSFERVPGIVHRVEGTGMWECIDFYPVGGGHNSSSEELYVIKASMDDERHDYYSLGRYDAAANTWTPLDAELDLGIGLRYDWGKLYASTSFYDPVKQRRIMLGYVGEVDSARADVAKGWASLQSIPRTVALDEKTRTNLLLWPVEEVEALRYNSTDLSGITIDNGSVFHLPLHQTTQLDIEASFRLDASDVAAINEADVGYNCSSSGGAAARGALGPFGLLVHAAGDLRGEQTAVYFYVSRALDGTLRTSFCNDETRSSRARDVTKRVVGSTVPVLDGEALSMRVLVDHSIVQSFAMGGRTTATSRVYPTEAIYARAGVYLFNNATGAGVTAERLIVHEMASAVYDETLMVEDS

SEQ ID NO: 67 - protein, 623 aa, Festuca arundinacea
MESRAFPSAAYAPLLPPTADDATLGKQDRPGVGWRGFLTVLAASGVVVLLVAASLLAGSRMGQAGDGEGNTDEDGAGGFPWSNEMLQWQRAGFHYQPEGHFMSDPDGPVYYRGYYHLFFQYNRRGVAWDDYIEWGHVVSQDLVHWRPLPVAMRPDHWYDKKGVLSGTITVLHNGTLVLLYTGVTEDPMAESQCIAVPTDPNNPLLRHWTKHPANPVLAHPQGVQGMDFRDPTSAWFDKSDATWRILIGSKDDDNGSHAGIAFIFKTKDFLSFERVPGIVHRVEGTGMWECIDFYPVGGGHNSSSEELYVIKASMDDERHDYYSLGRYDAAANTWTPLDAELDLGIGLRYDWGKLYAATSFYDPLKQRRIMLGYVGETDSARADVAKGWASLQSIPRTVTLDEKTRTNLLLWPVEEVEALRYNSTDLSGITIDNGSVFHLPLHQATQLDIEASFRLDASDVAAINEADVGYNCSSSGGAAARGAIGPFGLLVHAAGDLRGEQTAVYFYVSRALDGTLRTSFCNDETRSSRARDVTKRVVGSTVPVLDGEALSMRVLVDHSIVQSFAMGGRVTATSRVYPTEAIYARAGVYLFNNATGASVTAERLIVHEMASAVYDETLMVQDS

SEQ ID NO: 68 - protein, 619 aa, Lolium perenne
MESRDFPSAAYAPLLPSAADDVALAKQDRPGVGWRGFLTVLAACGVVVLLVAASLLAGSRMGQAGDTDEDGAGGFPWSNEMLQWQRAGFHYQPEGHFMSDPDGPVYYRGYYHLFFQYNRRGVAWDDYIEWGHVVSQDLVHWRPLPLAMRPDHWYDKKGVLSGTITVLHNGTLVLLYTGVTEDPMAESQCIAVPTDPNDPLLRHWTKHPANPVLAHPQGVQGMDFRDPTSAWWDKSDSTWRILIGSKDDDNGSHAGIAFIFKTKDFLIFERVPGIVHRVEGTGMWECIDFYPVGGGHNSSSEELYVIKASMDDERHDYYSLGRYDAAANTWTPLDAELDLGIGLRYDWGKLYASTSFYDPLKQRRIMLGYVGDVDSARADVAKGWASLQSIPRTVALDEKTRTNLLLWPVEEVEALRYNSTDLSGITVENGSIFHLPLHQATQLDIEASFRLDASDVAAINEADVGYNCSSSGGAAARGALGPFGLLVHAAGDLRGEQTAVYFYVSRALDGSLRTSFCNDETRSSRARDVAKRVVGSTVPVLDGEVLAMRVLVDHSIVQSFAMGGRVTATSRVYPTEAIYARAGVYLFNNATGASVTAERLIVHEMASAVYDETVMVKDS

SEQ ID NO: 69 - protein, 422 aa, Festuca arundinacea
MDKLNGSARLMIVSDLDHTMVDHHDEENLSLLRFGALWESAYCQDSLLVFSTGRSPTLYKELRKEKPMLTPDITIMSVGSEITYGEAMVPDDGWEEYLNNKWDRNIVLEETAKYSELKLQPETEQRPHKVSFLVDKKSAQEVIKSLSEKFEKRGVDAKIIYSGGQDLDILAQGAGKGQALAYLLKKFASCGKTPNNTLVCGDSGNDAELFSIPGVHGVMVSNAQEELLQWHAENAKDNPKVIHATERCAAGIIQAIGHFKLGPNISPRDIEFPYVKEDSFKPTAAVVKFYVLCEKWRRADVPKADSVIEYFKNITDASGVIIHPSGLELSIHSSIDALASCYGDKQGKKYRSWVDRLVISQTASDSWLVRFDLWEAEGDAWVCCLTTLALNVKPETPGGFVVTHIHKTWLKEYSGDEQASKL

SEQ ID NO: 70 - protein, 422 aa, Lolium perenne
MDKLNGSARLMIVSDLDHTMVDHHDEENLSLLRFGALWESTYCQDSLLVFSTGRSPTLYKELRKEKPMLTPDITIMSVGSEITYGEAMVPDDGWEEYLNNKWDKSIVLEETAKFSELKLQAETEQRPHKVSFLVDKKTAQEVIKSLSEKFEKRGVDAKIIYSGGQDLDILAQGAGKGQALAYLLKKFASCGKTPNNTLVCGDSGNDAELFSIPGVHGVMVSNAQEELLQWRAENAKDNPKVIHATERCAAGIIQAIGHFKLGPNVSPRDVEFPYVKEDSFKPTAAVVKFYVLCEKWRRADVPKTDSVIEYFKNITDASGVIIHPSGLELSIHSSIDALASCYGDKQGKKYRSWVDRLVISQTASDSWLVRFDLWEAEGDKWVCCLTTLALNVKPETPGGFVVTHIHKTWLKEYSGDEQASKL

SEQ ID NO: 71 - protein, 1062 aa, Festuca arundinacea
MAAGNEWINGYLEAILDAGSKLRPQGVQLPPLETAPALAAEESGAAYNPTRYFVEEVVRSFDEQALHKTWTKVVAMRNSQERSNRLENLCWRIWNVSRQKKQVEWDYTKEVARRKLEQELGSREAAEDLSELSEGEKDTTTAKPDAATAQPSTDDGEHQQPQPRTRLARINSEVRLVSDDEEEQTKKRNLYIVLISIHGLVRGENMELGRDSDTGGQVKYVVELARALAATAGVHRVDLLTRQISCPDVDWTYGEPVEMLERLSSADADEDDGEQSGGGAYIVRLPCGPRDQYIPKEELWPHIPEFVDRALSHVTEVARALGDQLQPPPTPAAGDGAALVAAPIWPYVIHGHYADAAEVAANLASALNVPMVMTGHSLGRNKLEQLLKLGRMPGPEIQGTYKIARRIEAEETGLDTAEMVVTSTKQEIEEQWGLYDGFDLMVERKLRVRQRRGVSSLGRYMPRMAVIPPGMDFSFVETQDTAEGDGADLQMLIAPDKAKKALPPIWSDVLRFFTNPHKPMILALSRPDPKKNVTTLLKAYGESRQLRELANLTLILGNRDDIEDMAGGGGAVLTAVLKLIDRYDLYGQVAYPKHHKQTDVPHIYRLAAKTKGVFTNPALVEPFGLTIIEAAAYGLPVVATKNGGPVDILKALNNGLLVDPHSAEAITGALLSLLAEKSRWVECRRNGLRNIHRFSWPHHCRLYLSHVSTYCDQPSPHQPLRVPLGLGSSTSFGADDSLSDSLRGLSLQISVDASSDLNAADSAAAIMDALRRRPASEKPASSGARALGFAPGRRESLLVVAVDCYGDDGKPDVKQLKKAIDAAVSVGECAGAKQGYVLSTGMTIPEAAEAIKACGADVASFDALICSSGAELCYPWKELAADEEYSGHVAFRWPGDHVKSAVPRLGSLEEIALAIDRPACSVHCHAYAATDASKVKKVDSIRKSLRMRGFRCNLVYTRACTRLNVIPLSASRPRALRYLSIQWGIDLSKVAVLVGETGDTDRERLLPGVHKTLILPGMVARGSEELLRGDDGYTMADVVAMDSPNIVTLAEGQSASDLLKAI

SEQ ID NO: 72 - protein, 1074 aa, Lolium perenne
MAGNDWINSYLEAILDAGGTAGDISAASVAGGDDGPGAGGGTAGEKRDKSSLMLRERGRFNPARYFVEEVISGFDETDLYKTWVRTSAMRSPQERNTRLENMSWRIWNLARKKKQIEGEEASRLSKKRLEREKARRDAAADLSEDLSEGEKGENINGSSVHDESTRGRMPRIGSTDAIEVWANQHKDKKLYIVLISIHGLIRGENMELGRDSDTGGQVKYVVELARALGETPGVYRVDLLTRQISAPDVDWSYGEPTEMLSPRNSENLGDDMGESSGAYIVRIPFGPREKYIPKEQLWPHIQEFVDGALVHIMQMSKVLGEQVGRERRVWPVVIHGHYADAGDSAALLSGALNVPMVFTGHSLGRDKLEQLLKQGRQTRDEVNATYKIMRRIEAEELCLDASEIVITSTRQEIEKQWGLYNGFDVTMERKLRARTKRGVSCYGRYMPRMIAIPPGMEFSHIVPHDVDLDGDEANEVGSGSPDPPIWADIMRFFSNPRKPMILALARPDPKKNITTLVKAFGEHPGLRNLANLTLIMGNRDVIDEMSSTNGAVLTSVLKLIDKYDLYGQVAYPKHHKQSEVPDIYRLAARTKGVFINCAYIEPFGLTLIEAAAYGLPMVATQNGGPVDIHRVLDNGILVDPHNQNDIAEALYKLVSDKHLWAQCRQNGLDNIHRFSWPEHCKNYLSRVGTVKPRHPRWQRSDDATEVSESDSPGDSLRDVHDISLNLKLSLDSEKAGTKINTERNSTNARRNLEDAVLKFSNAVSEGTKDESDENAEATTGSINGHLYGEKHIVVIAVDSVQNADLVQIIKNLFEASRKEKSSGAVGFVLSTSRAISETLTFLTSGGIQTTEFDAFICSSGSDLCYPSSSSEDMLSPTELPFMIDLDYHSQIEYRWGGEGLRKTLIRWAAENNSQSGQEVVTEDEECSSTYCISFKVKNTEAVPPVKDLRKTMRIQALRCHVLYSHDGSKLNLIPLLASRSQALRYLYIRWGVELANMTVVVGESGDTDYEGLLGGVHKTIILKGSFNAAPNQLHAARSYSLEDVISFDKPGIASVEGYLPDSLKSALQQFGVLN

SEQ ID NO: 73 - protein, 937 aa, Lolium perenne
MAAGNEWINGYLEAILDAGSKLRPQGVQLPPLETAPALAAEESSAAYNPTRYFVEEVVRSFDEQALHKTWTKVVAMRNSQERSNRLENLCWRIWNVSRQKKQVEWDYTKEVARRKLEQELGSREAAEDLSELSEGEKDTTTAKPDAAAAQPSADDGEHQQPQPRTRLARINSEVRLVSDDEEEQTKKRNLYIVLISIHGLVRGENMELGRDSDTGGQVKYVVELARALAATAGVHRVDLLTRQISCPDVDWTYGEPVEMLERLSSADADDDDGEQAGGGAYIVRLPCGPRDQYIPKEELWPHIPEFVDRALSHVTEVARALGEQLQPPPSPADGAVAAPIWPYVIHGHYADAAEVAANLASALNVPMVMTGHSLGRNKLEQLLKLGRMPGPEIQGTYKIARRIEAEETGLDTAEMVVTSTKQEIEEQWGLYDGFDLMVERKLRVRQRRGVSSLGRYMPRMAVIPPGMDFSFVETQDTADGTGRSQMLIAPDKAKKALPPIWSDVLRFFTNPHKPMILALSRPDPKKNVTTLLKAYGESRQLRELANLTLILGNRDDIEDMAGGGGAVLTAVLKLIDRYDLYGQVAYPKHHKQTDVPHIYRLAAKTKGVFINPALVEPFGLTIIEAAAYGLPVVATKNGGPVDILKALHNGLLVDPHSAEAITGALLSLLAEKSRWVECRRNGLRNIHRFSWPHHCRLYLSHVSTYCDQPSPHQPLRVPLALGSSTSFGADDSLSDSLRGLSLQISVDASSDLNAADSAAAIMDALRRRPASEKPASSGARALGFAPGRRESLLVVAVDCYGDDGKPDVEQLKKAIDAAVSVGECAGAKQGYVLSTGMTIPEAAEAIKACGADVASFDALICSSGAELCYPWKKLVADEEYSGHVAFRWPGDHVKSAVPRLGSMEEIALAIDRPASSVHCHAYAATDASKVSITEHYL

SEQ ID NO: 74 - protein, 808 aa, Lolium perenne
MAAKLTRLHSLRERLGATFSSHPNELIALFSKYVHQGKGMLQRHQLLTEFEALFEADKERYAPFEDILRAAQEAIVLPPWVALAIRPRPGVWDYIRVNVSELAVEELTVSEYLAFKEQLVDEHASSKFVLELDFEPFNASFPRPSMSKSIGNGVQFLNRHLSSKLFQDKESLYPLLNFLKAHNHQGTTMMLNDRIQSLRGLQSALRKAEEYLTSIPEDTPSSEFNHRFQELGLEKGWGDTAKRVQDTIHLLLDLLEAPDPASLEKFLGTIPMMFNVVILSPHGYFAQSNVLGYPDTGGQVVYILDQVRALENEMLLRIKQQGLDITPKILIVTRLLPDAVGTTCGQRLEKVIGTEHTDILRVPFRTEKGILRKWISRFDVWPYLETYTEDVANELMREMQTKPDLIIGNYSDGNLVATLLAHKLGVTQCTIAHALEKTKYPNSDIYLDKFDSQYHFSCQFTADLIAMNHTDFIITSTFQEIAGSKDSVGQYESHIAFTLPDLYRVVHGIDVFDPKFNIVSPGADMTVYFPYTETDKRLTAFHPEIEELLYSDVENSEHKFVLKDKNKPIIFSMARLDRVKNMTGLVEMFGKNAHLKDLANLVIVAGDHGKESKDREEQAEFKRMYSLIEEYKLEGHIRWISAQMNRVRNAELYRYICDTKGAFVQPAFYEAFGLTVVEAMTCGLPTIATCHGGPAEIIVNGVSGLHIDPYHSDKAADILVNFFEKSTADPTYWDKMSEGGLKRIYEKYTWKLYSERLMTLTGVYGFWKYVSNLERRETRRYLEMFYALKYRSLAAAVPLAVDGENTDN

SEQ ID NO: 75 - protein, 808 aa, Festuca arundinacea
MAAKLTRLHSLRERLGATFSSHPNELIALFSKYVHQGKGMLQRHQLLTEFEALFESDKERYAPFQDILRAAQEAIVLPPWVALAIRPRPGVWDYIRVNVSELAVEELTVSEYLAFKEQLVDEHASSKFVLELDFEPFNASFPRPSMSKSIGNGVQFLNRHLSSKLFQDKESLYPLLNFLKAHNHKGTTMMLNDRITSLRGLQSALRKAEEYLTSILEDTPSFEFNHRFQELGLEKGWGDTAKRVQDTIHLLLDLLEAPDPASLEKFLGTIPMMFNVVILSPHGYFAQSNVLGYPDTGGQVVYILDQVRALENEMLLRIKQQGLDITPKILIVTRLLPDAVGTTCGQRLEKVIGTEHTDILRVPFRTEKGILRKWISRFDVWPYLETYTEDVANELMREMQTKPDLIIGNYSDGNLVATLLAHKLGVTQCTIAHALEKTKYPNSDIYLDKFDSQYHFSCQFTADLIAMNHTDFIITSTFQEIAGSKDSVGQYESHIAFTLPDLYRVVHGIDVFDPKFNIVSPGADMSVYFPYTETDKRLTAFHPEIEELLYSDVENSEHKFVLKDKNKPIIFSMARLDRVKNMTGLVEMFGKNAHLKDLANLVIVAGDHGKESKDREEQAEFKRMYSLIEEYKLKGHIRWISAQMNRVRNAELYRYICDTKGAFVQPAFYEAFGLTVIEAMTCGLPTIATCHGGPAEIIVDGVSGLHIDPYHSDKAADILVNFFEKSTADPTYWDKMSEGGLKRIYEKYTWKLYSERLMTLTGVYGFWKYVSNLERRETRRYLEMFYALKYRSLAAAVPLAVDGENTDS

SEQ ID NO: 76 - protein, 814 aa, Lolium perenne
MGEAAGDRVLSRLHSVRERIGDSLSAHPNELVAVFTRLVNLGKGMLQPHQIIAEYNTAIPEAEREKLKDGAFEDVLRAAQEAIVISPWVALAIRPRPGVWEYVRVNVSELAVEELSVPEYLQFKEQLVEGSNKDFVLELDFEPFNASFPRPSLSKSIGNGVQFLNRHLSSKLFHDKESMYPLLNFLRAHNYKGMPMMMNDRVRSLSALQGALRKAEEHLSGLPADTPYSDFHHRFQELGLEKGWGDCAKRAQETLHLLLDLLEAPDPSTLEKFLGTIPMVFNVVILSPHGYFAQANVLGYPDTGGQVVYILDQVRAMENEMLLRIKQQGLDITPRILIVTRLLPDATGTTCGQRLEKVLGTEHTHILRVPFRTENGIVRKWISRFEVWPYLETFTDDVAHEISGELQANPDLIIGNYSDGNLVACLLAHKMGVTHCTIAHALEKTKYPNSDLYWKKFEDHYHFSCQFTTDLIAMNHADFIITSTFQEIAGNKDTVGQYESHMAFTMPGMYRVVHGIDVFDPKFNIVSPGADMSIYFPYSESQRRLTSLHPEIEELLYSDVDNDEHSCLKDRNKPIIFSMARLDRVKNLTGLVELYGRNPRLQELVNLVVVCGDHGNPSKDKEEQAEFKKMFDLIEQYNLNGHIRWISAQMNRVRNAELYRYICDTKGAFVQPAFYEAFGLTVIEAMTCGLPTFATAYGGPAEIIVNGVSGYHIDPYQGDKASALLVEFFEKCQGDHSHWTKISLGGLQRIEEKYTWKLYSERLMTLTGVYGFWKYVSNLERRETRRYLEMLYALKYRTMASTVPLAVEGEPSSK

SEQ ID NO: 77 - protein, 816 aa, Festuca arundinacea
MGESAGERALSRLHSVRERIGDSLSAHTNELVAVFSRLVNHGKGMLQPHQITAEYNAAIPEAEREKLKDTAFEDLLRGAQEAIVIPPWVALAIRPRPGVWEYVRVNVSELGVEELSVPEYLQFKEQLVNESTDNNFVLELDFGPFNASFPRPSLSKSIGNGVQFLNRHLSSKLFHDKESMYPLLNFLRAHNYKGMTMMLNDRIRSLSALQDALRKAEKHLSGLPADTPYSEFHHRFQELGLEKGWGDCTQRAHETIHLLLDLLEAPDPSTLEKFLGTIPMVFNVVILSPHGYFAQANVLGYPDTGGQVVYILDQVRAMENEMLLRIKQQGLDITPKILIVTRLLPDAHGTTCGQRLEKVLGTEHTHILRVPFKTEDGIVRKWISRFEVWPYLEAYTDDVAHEIAGELQANPDLIIGNYSDGNLVACLLAHKLGVTHCTIAHALEKTKYPNSDLYWKKFEDHYHFSCQFTADLIAMNHADFIITSTFQEIAGNKDTVGQYESHMAFTMPGLYRVVHGIDVFDPKFNIVSPGADMTIYFPYTEQQKRLTSLHAEIEELLFSDVENSEHKFVLKDKNKPIIFSMARLDRVKNMTGLVELYGRNPRLQELVNLVVVCGDHGKESKDKEEQAEFKRMFDLIEQYNLSSHIRWISAQMNRVRNGELYRYICDMKGAFVQPAFYEAFGLTVIEAMTCGLPTFATAYGGPAEIIVNGVSGYHIDPYQNDKASALLVEFFEKCQEDPSHWNKISQGGLQRIEEKYTWKLYSERLMTLSGVYGFWKYVSNLDRRETRRYLEMLYALKYRKMATTVPLAIEGETTGK

SEQ ID NO: 78 - protein, 478 aa, Festuca arundinacea
WIILEPAIEPDTPGDIKGCWSASATVISGSQPVIMYTGGDVENHQVQNIALPKNRSDPYLIEWTKACNNPVLQPVGPGMNPGEFRDPTTGWIGPDGLWRISIGAEVNGYSAALLYKSEDFLNWSRVDHPLYSSSASTMWECLDFFAVLPGSNGGLDLSAAIPKGAKHVLKVSVDQCDKYMIGVYDLEHDAFVPDTILDDRWLLPRIDYGNYYASKSFFDSKNRRRIIWGWTNESDSSSDDVAKGWAGIYAIPRTIWLDRDGKQLLQWPVEEIESLRRNEINYQGLDLEKGDLYEIKGVDTLQADVEIDFELTSIDDADSFDPSWLLDPEKHCREAGASVHGGIGPFGLVILATGDMEEHTVVHFRVYKSQKEYMILMCSDIRRSSLRQGLYAPAYGGFFEFDLEKERKISLRTLIDRSAVESFGGGGRVCIIARVYPVAIVDDGSAHMYAFNNGSTTVRVPQIRAWSMMTAQVNLKKG

SEQ ID NO: 79 - protein, 583 aa, Lolium perenne
MGNPKWVLAPWAVLLLLQLASASHHARLSLETSAASPSVPASIVSPLLRTGYHFQPPMNWINDPNGPLYYKGWYHLFYQYNPKGAVWGNIIWAHSVSRDLINWIALEPAISPTIPTDQYGVWSGSTTILHDGTPAILYTGIDRPSVNYQIQNIALPKNASDPLLREWYKPGYNPIAVPVEGINATQFRDPTTAWFAGRHWRMLVGGLRPGTLRGEAILYRSRDFKHWVRAKHPLHSALTGMWECPDFFPVGKAGVEKGLDTSEYGAAAGVEKHVLKNSLDLTRYDYYTIGTYDNVKERYVPDNPTGDVYQRLQYDYGNFYASKTFFDPVKQRRILLGWANESDSVAHDKAKGWAGIQAIPRKIWLDPSGKQLVQWPVEELEKLRGKPVNVGDKVVKPGQHFEVTGLQSYQSDVEVSFEVSSLDKAEPFDPAYSNDAQKLCGIKGADVKGGVGPFGLWVLSSADLAEKTAVFFRVFKDGYGKPIVLMCSDPTKSSLTPDLYKPTFAGFVDTDISSGKISLRSLIDRSVVESFGAGGKTCILSRVYPSMALGKDAHLHVFNNGETDIKVSKLTAWEMKRPLMNGA

SEQ ID NO: 80 - protein, 390 aa, Lolium perenne
GVGSLLVYRSADFLRWQRNAAPLHASSRDVPVLECPDLFPVAAAAQGATEGLETSAPSGAGVRHVLKLTDFAKEDHYMVGFYDDVADTFVPAEPERGDDPDNWRRLDHGHLYASKSFYDARNKRRILWAWVDETDGGGVARGWAGIQAFPRAMWLDADGKRLVQWPVEEIETLRRKRVGLRWATDVEAGGRKEIAGIVSSQADVEVVFEIPNLEEAETLDPEWVLDPKGLCAAKGASVHGGVGPFGLLVLASGDLEEHTAVFFRVFKHDGKYKVLMCTDLTKSSTKAGAHKPSYGAFLDVDVEKDKFISLRTLIDHTVVESFGDGGRTCMTARVYPEHAAMGSTHLYVFNNGTGAVKVSKLEAWELATAAVNGGSLAPVVVKASDPKEAL

SEQ ID NO: 81 - protein, 597 aa, Festuca arundinacea
MAGLRLAACAAVAVLLCLLLSSSAALRWLSDPAPESAAAGVSHDSYRTAYHFQPTENWQNDPNGPMYYKGVYHFFYQYNPYRATWGNGNLSWGHSVSVDLVNWSALENAMDPDSSFDINGCWSGSATILPDGTPVFLYTGIDADNNQVQNVAFPKNASDPLLREWVKPSYNPVIALPDDVVHDNFRDPSTAWLGRDGLWRVAVSAGLKDGTGTTLVYRSKDFRQWERNAEPLYSSSDAGMVECPDLFPLAEPGDQHGLDYTPSNGAAVSYVLKQSVMDTLSDYYVLGRYDDAADTFSPVEADNDCRTWQRFDYGHVYASKSFYDAGKKRRVLWSWANESDPEADYLARGWAGVQAVPRRIWLDSKGKQLLQWPIEEIETLRKTRVGLLGAEMNAGGMNEIIGVAGAQADVEVVFEVPSLEGAENLDPNQLLDPQRLCGEKGASVLGGVGPFGLLVLASGDLQEHTSVFFRVFRHEGKYKVLMCTDLRRSTTRADVYKPPYGGFVDIDIEKERSISLRTLVDHSVVESYGGGGRTVITARVYPEHAATTNSRLFMFNNGTGAVKVSKLDAWELAPAKVNVPGDGLITAGSSMHLREAY

SEQ ID NO: 82 - protein, 399 aa, Festuca arundinacea
LNSTEFRDPTTGWIGPDGLWRIAIGAELNGYGAALLYKSEDFLNWTRVDHPLYSDNAPSMWECPDFFAVLPGNNGGLDLSAAIPKGAKHVLKMSVDYSDKYMIGVYDLKRDAFVPDVVLDDRRLWLRIDYGTFYASKSFFDSKRGRRVIWGWSNETDSVSDDGAKGWAGIHAIPRSIWLDSDGKQLLQWPIDEIESLRRDEINHQGLELKNGDLFEIKGIDTLQADIEVDFELTSIDSADPFDPSWLLDVERHCREAGASVQGGIGPFGLVVLASDNMEEHIAVHFRVYKSQKSHMILMCSDLRRSSLRSGLYTPAYGGFFEFDLEKERKISLRTLIDRSAVESFGGGGRVCITARIYPVALVDGRVHMYAFNNGSTTVRVPQLGAWSMMTAQVNVNKG

SEQ ID NO: 83 - protein, 583 aa, Festuca arundinacea
MGNPKWIFAPWAVLLLFLLQLACASHHTRRSLETEAASPSVPASIVSPLLRTGYHFQPPMNWINDPNGPLYYKGWYHLFYQYNPKGAVWGNIIWAHSVSRDLINWIALEPAITPSIPTDKYGVWSGSTTILHDGTPAILYTGIDRPSINYQIQNIALPKNASDPLLREWYKPGYNPIAVPVAGMNATQFRDPTTAWFAGRHWRMLVGGLRPGTLRGEAILYRSLDFKNWTRAHHPLHSALTGMWECPDFFPVGEAGVEKGLDTSEHGEGVEKHVLKNSLDLTRYDYYTVGTYDNVKERYVPDNPTGDVYRRLQYDYGNFYASKTFFDPVKQRRILLGWANESDSVAHDKAKGWAGIQAIPRKIWLDPSGKQLVQWPVEELEKLRGKPVTVGDKVVKPGQHFEVTGLQSYQSDVEVSFEVSSLDKAEPFDPAYSNDAQKLCGIKGADANGGVGPFGLVVLASADLAEKTAVFFRVFKDGYGKPIVLMCSDPTKSSLTPDLYKPTFAGFVDTDISSGKISLRSLIDRSVVESFGAGGKTCILSRVYPSMALGKNAHLHVFNNGETDIKVSKLTVWEMKRPLMNGA

SEQ ID NO: 84 - protein, 346 aa, Lolium perenne
MYYNGIYHEFYQYNPNGSLWGNIIWGHSVSTDLINWIPVEPAIERDIPSDINGCWTGSATIISGDQPIIIYTGADKENRQLQNIVLPKNKSDPYLREWTKAGNNPVIQPVGPGLNASQFRDPTTGWIGPDGLWRIAVGAELNGYGAALLYKSQDFLNWTRVDHPLYSSNASSMWECPDFFAVLPGNSGGLDLSAEIPNGAKHVLKMSLDSCDKYMIGVYDLKSDTFMPDSVLDDRRLWSRIDHGNFYASKSFFDSKKGRRIIWGWTNETDSSSDDVAKGWAGIHAIPRTIWLDSYGKQLLQWPIEEIESLRRNEISHQGLELKKGDLFEIKGTDTSQVVHVFLGKL

SEQ ID NO: 85 - protein, 581 aa, Festuca arundinacea
MAGLRLAAVAFHLCLLLSPSSSLRRLYHEDDEAESTPGHGGSRTAYHFQPAKNWQNDPNGPMYHNGLYHLFYQYNPRGATWGNGNLSWGHSVSVDLVNWAALDTALDPDSPFDANGCWSGSATILPDGQPAILYTGIDAAGNQVQNVAFPKKASDPLLREWVKPDYNPVIPLPKDVVHDSFRDPSTAWRGRDGLWRVAIAAKVNVTVTVGSTLIYRSKDFRRWERNAAPLYESLAAGMVECPDLFPVAKPGAQNGLDYAPSSRAARHVLKLSVVATLQDYYVVGLYDDTADTFNAAAGADNDWRTWRRIDYGHVYASKSFFDARKNRRVLWCWANESDTEADYIARGWSGVQTVPRKIWLDIDGKQLLQWPIKEIETLRKKRVGLLGTEMNSGGLNEIIGVAGSQADVEVVFKIPTLEGAENIEPNELLDPQKLCGNNGASMRGSIGPFGLLLLASGDLLEHTSVFFRVFKHGAKYKVLMCTDLTRSTTRSDVYKPSYGGFVDMDIDKTKSISLRTLIDHSVVESFGGGGRTCITARVYPEHAEMSNSHIYMFNNGTGAVKVAKLEAWELATANVNVAGHG

SEQ ID NO: 86 - protein, 588 aa, Lolium perenne
MGVRLGRVAWACPAVLVLLLQLAGASHVVYETSLLETEAAAATVPASIFELSTGYHFRPQKNWINDPNAPLYYKGWYHLFFQYNPKGAVWGNIVWAHSVSRDLINWVALETALAPSIDADKYGCWSGSATIMPDGTPVIMYTGVSRPDVNYEVQNVAFPKNSSDPLLREWVKPAHNPVIVPEGGINATQFRDPTTAWYADGHWRILVGALSGASRGVAYVYRSRDFRRWTRVRKPLHSAPTGMWECPDFYPVTVDGKESGVDTSVVSSSRVKHVLKNSLDLRRYDYYTVGTYDRLKERYVPDNPAGDKHHLRYDYGNFYASKTFYDPSKRRRILWGWANESDTAVDDVAKGWAGIQAIPRKVWLDPSGRQLMQWPVEEVKALRGKKPVSLKDRMVKRGEHVEVTGLQTAQADVEVSFEVPSLEGAEALDPALANDAQKLCGVKGADVEGGVGPFGLWVLASSKLEERTAVFFRVFKAAGNVNSTKPLVLMCSDPTKSSLNKNLYHPTFAGFVDIDMAKGKISLRSLIDQSVVESFGAGGRTCILSRVYPSLAIGRNAHLHVFNNGKADIKVSRLTAWEMKKPALMNGA

SEQ ID NO: 87 - protein, 668 aa, Lolium perenne
MEARDGVSMPYSYAALPEDAEAAVVGRGRRTGPLFAALLLTLVAALLAVAALAGVRLVGELPAGGVVMPNHPMEVMDVSGSRGPESGVSEKTSGAASESGGMLGADAGSNAFPWSNAMLQWQRTGFHFQPEKNWMNDPNGPVYYKGWYHLFYQYNPEGAIWGNKIAWGHAVSRDMLRWRHLPIAMFPDQWYDINGAWSGSATVLPDGRIVMLYTGSTNASVQVQCLAFPSDPSDPLLTNWTKYEGNPVLYPPPHVGEKDFRDPTTAWYDGSDGMWRIVIGSKDNRRAGMALTYKTKNFHDFELVPGVLHRVPATGMWECIDLYPVGGARGIDMTEAVAAASNSGGGEVLHVMKESSDDDRHDYYALGRYDAATNKWTPLDADADVGIGLRYDWGKFYASKTFYDPAKKRRVLWGWVGETDSERADVAKGWASLQSIPRTVVLDTKTGSNLIQWPVVEVETLRTNSTNLGSIIVEHGSVFPLSLHRATQLDIEASFRLDPLDVAAAKEADVGYNCSTSGGAAGRGALGPFGLLVLADARRHGGDTEQTAVYFYVARGLDGNLRTHFCHDESRSSRANDIVKRVVGNIVPVLDGKALSVRVLVAHSIVESFAQGGRSVVTSRVYPTEAIYANAGVYLFNNATGARVPATSLVVHKMDPSYNQNQAEMASL

SEQ ID NO: 88 - protein, 473 aa, Lolium perenne
VHWRHLPLAMVPDQWYDINGVWTGSATVFPDGTLNMLYTGSTNASVQAQCLAVPEDPNDSLLRNWTKHEANPVLLPPPGIGDKDFRDPTTAWFDESDQTWRTVIGSKDNNGHAGIAMVYKTKDFLNYELIPGYLHRVDGTGMWECIDFYPVGGKNGSEELYVIKESSDDDRHDWYTLGKYDAAANTFTAADPENDLGIGLRYDWGKFYASKTFYDPAKKRRVLWGWIGETDSERADVAKGWASLMSIPRTVELDEKTWTNLIQWPVEEIETLRIKSTDLGGITIDHGSVYPLPLHRATQLDIEASFRLDAATVAALNEADVGYNCSTSGGSTHRGALGPFGILVLADGKAEQTAVYFYVSKGLDGALETHFCHDESRSTLAKDVVKRVVGYTVPVLDGEAFSVRVLVDHSIVESFAMGGRSTATSRVYPTESIYGAAGAYLFNNATGGSVTVEKLVVHEMDSSYNQIFMADDL

SEQ ID NO: 89 - protein, 539 aa, Lolium perenne
IFRSRLPDIDIPTHMPLHDYCFATAASAPDAPCLITAATGRTYTFAETHLLCRKAAAALHGLGVRHGDRIMVLLQNSVEFALAFFGASMLGAVSTAANPFCTPQEIHKQLVASGAKLVVTQSAYVDKLRHEAFPRIGEALTVITIDDDGTPDGCQPFWGLVSAADENSVPESPISPDDAVALPYSSGTTGLPKGVVLTHGGLVSSVAQQVDGENPNLHMRAGEDVVLCVLPLFHIFSLNSVLLCALRAGAAVMLMPRFEMGAMLEGIERWRVTVAAVVPPLVLALAKNPGVEKHDLSSIRIVLSGAAPLGKELEDALRGRLPQAIFGQGYGMTEAGPVLSMCPAFAREPTPAKSGSCGTVVRNAELKVVDPDTGVSLGRNLPGEICIRGPQIMKGYLNDPVATAATIDVEGWLHTGDIGYVDDDDEVFIVDRVKELIKFKGFQVPPAELEALLIAHPSIADAAVVPQKDDAAGEVPVAFVVRAADSDIAEEAIKEFVSKQVVFYKRLHKVYFTHAIPKSASGKILRKELRAKLAAPATA

SEQ ID NO: 90 - protein, 559 aa, Lolium perenne
MGSIAADLAPEAPAELVFRSKLPDIEIPTHLTLQDYCFERLPELSARACLIDGATGAALTYGEVDALSRRCAAGLRRLGVRKGDVVMALLRNCPEFAFVFLGAARLGAATTTANPFYTPHEIHRQAAAAGAKVIVTEACAVEKVRAFAAERGIPVVSVDEAVDDGCLPFAATLLGEESGERFVDEAVDPDDVVALPYSSGTTGLPKGVMLTHRSLVTSVAQQVDGENPNLHFSSSDVLLCVLPLFHIYSLNSVLLAGLRAGCAIVIMRKFDHGALVDLVRAHGVTVAPFVPPIVVEIAKSARVTAADLASIRLVMSGAAPMGKELQDAFMAKIPNAVLGQGYGMTEAGPVLAMCLAFAKEPFEVKSGSCGTVVRNAELKIVDPDTGASLGRNLPGEICIRGKQIMKGYLNDPEATKNTIDKDGWLHTGDIGYVDDDDEIFIVDRLKEIIKYKGFQVPPAELEALLITHPEIKDAAVVSMQDELAGEVPVAFVVRTEGSEISENEIKQFVAKEVVFYKRICKVFFADSIPKSPSGKILRKDLRAKLAAGIPGSDTTQSKN

SEQ ID NO: 91 - protein, 559 aa, Festuca arundinacea
MGSIAADAPEAPPAELVFRSKLPDIEIPTHLTLQDYCFQRLPEHSARACLIDGATGAALTYGEVDALSRRCAAGLRRLGVRKGDVVMALLRNCPEFAFVFLGAARLGAATTTANPFYTPHEIHRQATAAGAKVIVTEACAVEKVRAFAAERGITVVSVDEGVDDGCLPFGETLLGEDGGERFVDEAVDPDDVVALPYSSGTTGLPKGVMLTHRSLVTSVAQQVDGENPNLHFSSSDVLLCVLPLFHIYSLNSVLLAGLRAGCAIVIMRKFDHGALVDLVRAHGVTVAPFVPPIVVEIAKSARVTAADLASIRLVMSGAAPMGKELQDAFMAKIPNAVLGQGYGMTEAGPVLAMCLAFAKEPFEVKSGSCGTVVRNAELKIVDPDTGASLGRNLPGEICIRGKQIMKGYLNDPEATKNTIDKDGWLHTGDIGYVDDDDEIFIVDRLKEIIKYKGFQVPPAELEALLITHPEIKDAAVVSMQDELAGEVPVAFVVRTEGSEISENEIKQFVAKEVVFYKRICKVFFADSIPKSPSGKILRKDLRAKLAAGIPGSETTQSKS

SEQ ID NO: 92 - protein, 557 aa, Lolium perenne
MGSVPEESVVSVAAAETVFRSKLPDIEINNEQTLQSYCFEKMAEVASRPCIIDGQTGASYTYTEVDYLTRRAAAGLRRMGVGKGDVVMNLLRNCPEFAFSFLGAARLGAATTTANPFYTPHEIHRQAEAAGAKLIVTEACAVEKVLEFAAGRGLPVVTVDGRRDGCVDFAELIAGEELPEADEAGILPDDVVALPYSSGTTGLPKGVMLTHRSLVTSVAQLVDGSNPNVCFNKDDALLCLLPLFHIYSLHTVLLAGLRVGAAIVIMRKFDVGALVDLVRAHRITIAPFVPPIVVEIAKSDRVGADDLASIRMVLSGAAPMGKDLQDAFMAKIPNAVLGQGYGMTEAGPVLAMCLAFAKEPFKVKSGSCGTVVRNAELKVVDPDTGASLGRNQPGEICVRGKQIMIGYLNDPESTKNTIDKDGWLHTGDIGLVDDDDEIFIVDRLKEIIKYKGFQVAPAELEALLLTNPEVKDAAVVGVKDDLCGEVPVAFIKRIEGSEITENEIKQFVSKEVVFYKRINKVYFTDSIPKNPSGKIVRKDLRARLAAGIPTEVAAPRS

SEQ ID NO: 93 - protein, 557 aa, Festuca arundinacea
MGSVPEESVVAAAVAETVFRSKLPDIEINNEQTLQSYCFEKMAEVASRPCIIDGQTGASYTYTEVESLTRRAAAGLRRMGVGKGDVVMNLLRNCPEFAFSFLGAARLGAATTTANPFYTPHEIHRQAEAAGAKVIVTEACAVEKVLEFAAERGLPVVTVDGKRDGCVDFAELIAGEELPEAEEAGILPDDVVALPYSSGTTGLPKGVMLTHRSLVTSVAQLFDGSNPNVCFNKDDALLCLLPLFHIYSLHTVLLAGLRVGAAIVIMRKFDVGALVDLVRAHRITIAPFVPPIVVEIAKSDRVTADDLTSIRMVLSGAAPMGKDLQDAFMAKIPNAVLGQGYGMTEAGPVLAMCLAFAKEPFKVKSGSCGTVVRNAELKVVDPDTGASLGRNQPGEICVRGKQIMIGYLNDPESTKNTIDKDGWLHTGDIGLVDDDDEIFIVDRLKEIIKYKGFQVAPAELEALLLTNPEVKDAAVVGVKDDLCGEVPVAFIKRIEGSEITENDIKQFVSKEVVFYKRINKVYFTDSIPKNPSGKILRKDLRARLAAGIPTEVAAPRS

SEQ ID NO: 94 - protein, 501 aa, Lolium perenne
MEVLLLEKALLGLFAAAVLAIAVAKLAGKRFRLPPGPSGAPIVGNWLQVGDDLNHRNLMGIAKRFGEVFLLRMGIRNLVVVSSPELAKEVLHTQGVEFGSRTRNVVFDIFTGNGQDMVFTVYGDHWRKMRRIMTVPFFTNKVVAQNRVGWEEEARLVVEDVKADPAFATAGTVIRRRLQLMMYNDMFRIMFDRRFESVDDPLFNKLKAMNAERSILSQSFDYNYGDFIPILRPFLRKYLNRCTNLTTKRMKLFEDHFVADRKKALEQNGEIRCAMDHILEAERKGEINHDNVLYIVENINVAAIETTLWSIEWGIAELVNHPDVQSKLRDEMTAVLGADVAVTEPDLERLPYLQSVVKETLRLRMAIPLLVPHMNLSDAKLAGYDIPAESKILVNAWFLANDPKRWVRADEFRPERFLEEEKAVEAHGNDFRFVPFGVGRRSCPGIVLALPIIGITLGRLVQNFQLLPPPGQDKIDTTEKPGQFSNQILKHATVVCKPLEA

SEQ ID NO: 95 - protein, 505 aa, Festuca arundinacea
MDFVFVEKLLVGLLASVVVAIVVSKIRGRKLRLPPGPIPVPIFGNWLQVGDDLNHRNLAAMARKFGEVFLLRMGIRNLVVVSSPELAKEVLHTQGVEFGSRTRNVVFDIFTGKGQDMVFTVYGDHWRKMRRIMTVPFFTNKVVQQYRAGWEAEAAFVVDNVRADPKAATDGVVLRRHLQLMMYNNMYRIMFDRRFESMDDPLFLRLRALNGERSRLAQSFEYNYGDFIPVLRPFLRGYLGLCEQVKETRLKLFKDYFLDERKKLASTKSMDTNGLKCAIDHILEAQEKGEINEDNVLYIIENINVAAIETTLWSIEWGIAELVNHPEIQQKLRDEMDAVLGAGHQITEPDTHKLPYLQAVIKETLRLRMAIPLLVPHMNLHDAKLAGYNIPAESKILVNAWFLANNPEQWKRPDEFRPERFLEEEKHVEASGNDFRFLPFGVGRRSCPGIILALPILGITIGRLVQNFELTTPPGVDKLDTTEKGGQFSLHILNHSTIVAKPRVF

SEQ ID NO: 96 - protein, 361 aa, Lolium perenne
MGIVNASEKTITGWAARDATGHLSPYTYNLRRTGAEDVVLKVLYCGICHTDLHQTKNHLGAPKYPMVPGHEVVGEVVEVGPEVSKYSVGDVVGVGVIVGCCRDCRPCKANVEQYCNKKIWSYNDVYTDGKPTQGGFASSMVVDQKFVVKIPAGLAPEQAAPLLCAGVTVYSPLKHFGLMTPGLRGGILGLGGVGHMGVKVAKSMGHHVTVISSSDKKRAEAMDDLGADAYLVSSDEAQMAAAMDSLDYIIDTVPVKHPLEPYLALLKMDGKLVLMGVIGEPLSFVSPMVMLGRKTITGSFIGSIEETEEVLRFCVDKGLTSQIEVVKMDYLNQALERLERNDVRYRFVVDVAGSNIDDTAA

SEQ ID NO: 97 - protein, 361 aa, Festuca arundinacea
MGSVDASEKTITGWAARDTTGHLSPYTYTLRRTGAEDVVLKVLYCGICHTDLHQTKNHLGASKYPMVPGHEVVGEVVEVGPEVSKYSVGDVVGVGVIVGCCHDCRPCKANVEQYCNKKIWSYNDVYTDGKPTQGGFASAMVVDQKFAVKIPAGLAPEQAAPLLCAGVTVYSPLKHFGLMTPGLRGGILGLGGVGHMGVKVAKSMGHHVTVISSSNKKRAEAMDDLGADAYLVSSDEAQMAAAMDSLDYIIDTVPVKHPLEPYLALLKMDGKLVLMGVIAEPLSFVSPMVMLGRKTITGSFIGSIEETEEVLRFCVEKGLTSQIEVVKMDYLNHALERLERNDVRYRFVVDVAGSNIKDADA

SEQ ID NO: 98 - protein, 265 aa, Lolium perenne
MATTAADATATVAKEQTTTNGAASGAEQVTRHSEVGHKSLLQSDALYQYILETTVYPREHECMKQLREDTANHPWNLMTTSADEGQFLNLLIKLIGAKKTMEIGVYTGYSLLATALAIPEDGTILAMDINRENYETIGKPCIEKAGVAHKIDFREGPALPVLDELLEDEANHGTFDFVFVDADKDNYLNYHQRLMKLVRVGGLLGYDNTLWNGSVVLPADAPMRKYIRYYRDFVLELNKALAADDRVEICQLPVGDGITLCRRAK

SEQ ID NO: 99 - protein, 265 aa, Festuca arundinacea
MATTAADATATVPKEQPATNGAASGAEQVTRHSEVGHKSLLQSDALYQYILETTVYPREHECMKQLREDTANHPWNLMTTSADEGQFLNLLIKLIGAKKTMEIGVYTGYSLLATALAIPEDGTILAMDINRENYETIGKPCIEKAGVAHKIDFREGPALPVLDELLEDEANHGSFDFVFVDADKDNYLNYHQRLMKLVRVGGLIGYDNTLWNGSVVLPADAPMRKYIRYYRDFVLELNKALAADDRVEICQLPVGDGITLCRRAK

SEQ ID NO: 100 - protein, 363 aa, Lolium perenne
MTVVEVLAAGDAAAAAVARPAGNGQTVCVTGAAGYIASWLVKLLLEKGYTVKGTVRNPDDPKNAHLRALDGAADRLVLCKADLLDYDAIRRAIDGCHGVFHTASPVTDDPEQMVEPAVRGTQYVIDAAAEAGTVRRMVLTSSIGAVTMHPNRGPDVVVDESCWSDLDFCKKTRNWYCYGKAVAEQAASELARQRGVDLVVVNPVLVIGPLLQPTVNASIGHILKYLDGSASKFANAVQAYVDVRDVADAHLRVFECAAASGRHLCAERVLHREDVVRILAKLFPEYPVPTRCSDEANPRKQPYKMSNQKLQDLGLEFRPVSQSLYETVKSLQEKGHLPVLSEQAEADKETLAAELQAGVTIRA

SEQ ID NO: 101 - protein, 342 aa, Festuca arundinacea
MTVVDAAAPQLPGHGQTVCVTGAAGYIASGLVKLLLERGYTVKGTVRNPDDPKNAHLKALDGATERLILCKADLLDYDAICAAVEGCHGVFHTASPVTDDPEQMVEPAVRGTEYVINAAADAGTVRRVVFTSSIGAITMDPNRGPDVVVNESCWSDLEFCKKTKNWYCYGKAVAEQAAWEAARKRGIDLVVVNPVLVVGPLLQPTVNASAAHILKYLDGSAKKYANAVQSYVDVRDVAGAHIRVFEAPEASGRYLCAERVLHRGDVVQILSKLFPEYPVPTRCSDEVNPRKQPYKMSNQKLQDLGLQFTPVNDSLYETVKSLQEKGHLLVPSKPEGLNGVTA

SEQ ID NO: 102 - protein, 360 aa, Festuca arundinacea
MGSTAADMAASADQEACMFALQLASSSILPMTLKNAIELGLLEILVAAGGKSLTPTEVAAKLPSAANPEAPDMVDRMLRLLASYNVVTCLVEEGKDGRLSRSYGAAPVCKFLTPNEDGVSMAALALMNQDKVLMESWYYLKDAVLDGGIPFNKAYGMSAFEYHGTDPRFNRVFNEGMKNHSIIITKKLLELYHGFQGLGTLVDVGGGVGATVAAIAAHYPAIKGVNFDLPHVISEAPQFPGVTHVGGDMFKEVPSGDAILMKWILHDWSDQHCATLLKNCYDALPAHGKVVLVECILPVNPEAKPSSQGVFHVDMIMLAHNPGGRERYEREFEALARGAGFTGVKSTYIYANAWAIEFTK

SEQ ID NO: 103 - protein, 360 aa, FLolium perenne
MGSTAADMAASADEDACMFALQLASSSVLPMTLKNAIELGLLEILVAAGGKSLTPTEVAAKLPSAANPEAPDMVDRILRLLASYNVVTCLVEEGKDGRLSRSYGAAPVCKFLTPNEDGVSMAALALMNQDKVLMESWYYLKDAVLDGGIPFNKAYGMSAFEYHGTDPRFNRVFNEGMKNHSIIITKKLLELYHGFEGLGSLVDVGGGVGATVAAIAAHYPTIKGVNFDLPHVISEAPQFPGVTHVGGDMFKEVPSGDAILMKWILHDWSDQHCATLLKNCYDALPAHGKVVLVECILPVNPEANPSSQGVFHVDMIMLAHNPGGRERYEREFQALARGAGFTGVKSTYIYANAWAIEFTK

SEQ ID NO: 104 - protein, 360 aa, Festuca arundinacea
MGSTAADMTASADEEACMFALQLASSSILPMTLKNAIELGLLEILVAAGGKSLTPTEVAAKLPSAANPEAPDMVDRMLRLLASYNVVSCLVEEGKDGRLSRNYGAAPVCKFLTPNEDGVSMAALALMNQDKVLMESWYYLKDAVLDGGIPFNKAYGMSAFEYHGTDPRFNRVFNEGMKNHSIIITKKLLELYDGFQGLGTLVDVGGGVGATVAAITAHYPAIKGVNFDLPHVISEAPPFPGVTHVGGDMFKKVPSGDAIMMKWILHDWSDQHCATLLKNCYDALPAHGKVVLVECILPVNPEAKPSSQGVFHVDMIMLAHNPGGRERYEREFEALARGAGFAGVKSTYIYANAWAIEFTK

SEQ ID NO: 105 - protein, 361 aa, Lolium perenne
MGSTAAEIAASADEEACLYALQLGSSSILPMTLKNTIELGLLETLMAAGGKSLTPTEVAAKLPCAAKNPEAPDMVDRMLRLLASYNLVSCLVEEGTDGRLSRRYGAAPVCKFLTPNEDGVSMAALALMNQDKVLMESWYYLKDAVLDGGIPFNKAYGMSAFEYHGTDLRFNRVFNEAMKNNSIIITKKLLQLYDGFQGLGTLVDVGGGVGATVAAITAHYPTIKGINFDLPHVISEAPPFPGVTHIGGDMFKKVPSGDAILMKWILHDWSDQHCATLLKNCYDALPVHGKVVLVECILPVNPEAKPSSQGVFHVDMIMLAHNPGGRERYEREYEALARGAGFAGFKSTYIYANAWAIEFTK

SEQ ID NO: 106 - protein, 532 aa, Lolium perenne
MVGFAKIAMEWIQDPLSWLFIASVVFVVLQRRRRGNVAPFPPGPKPLPIVGNMSMMDQLTHRGLAALAKEYGGLLHIRLGKLHTFAVSTPEYAREVLQVQDGAFSNRPATIAIAYLTYDRADMAFAHYGPFWRQMRKLCVMKLFSRRRPETWLAVRDESAALVRAVARRTGESVDLGELIFKLTKNVIFRAAFGAGAVAADAEEGDGAGKQDEFIAILQEFSKLFGAFNIGDFIPWLSWADPQGINVRLRAARNALDEFIDKIIDEHMERGKNPDDADADMVDDMLAFLPEAKPKKGAAGDGVDDLQNTLRLTRDNIKAIIMDVMFGGTETVASAIEWAMAEMMHSPDDLRRLQQELVDVVGLDRNVDESDLDKLPFLKCVIKETLRLHPPIPLLLHETAEDCVVGGYSVPRGSRVMINVYAIGRDRRAWKDADVFRPSRFVQGEGEAAGLDFKGGCFEFLPFGSGRRSCPGMALGLYALELAVAQLAHGFSWELPDGMKPSELDMSDVFGLTAPRATRLFAVPTPRLACTQ

SEQ ID NO: 107 - protein, 542 aa, Festuca arundinacea
MVGFAKIAMEWLQEPLSWLFIASVVFVVLQRRRRGNVAPFPPGPKPLPIVGNMSMMDQLTHRGLAALAKEYGGLLHIRLGKLHAFAVSTPEYAREVLQVQDGAFSNRPATIAIAYLTYDRADMAFAHYGPFWRQMRKLCVMKLFSRRRPETWLAVRDESAALVRAVARRSGESVDLGELIFKLTKNVIFRAAFGAGAVAGDGDGDGAGKQDEFIAILQEFSKLFGAFNIGDFIPWLSWADPQGINVRLRAARAALDEFIDKIIDEHMERGKNPDDADADMVDDMLAFLPETKPKKGAAGDGVDDLQNTLRLTRDNIKAIIMDVMFGGTETVASAIEWAMAEMMHSPGDLRRLQQELADVVGLDRNVDESDLDKLPFLKCVIKETLRLHPPIPLLLHETAEDCIVGGYSVPRGSRVMINVYAIGRDRKAWKDADVFRPSRFVQGEGEAAGLDFKGGCFEFLPFGSGRRSCPGMALGLYALELAVAQLAHGFSWELPDGMKPSELDMSDVFGLTAPRATRLFAVPTPRLACTQLLGADDAGRQA

SEQ ID NO: 108 - protein, 711 aa, Lolium perenne
MESENVAANGDGLCVAQPARADPLNWGKAAEELSGSHLDAVKRMVEEYRRPVVTMEGASLTIAMVAAVAAGADTRVELDESARGRVKESSDWVMNSMANGTDSYGVTTGFGATSHRRTKEGGALQRELIRFLNAGAFGTGSDGHVLPAATTRAAMLVRVNTLLQGYSGIRFEILETVATLLNANVTPCLPLRGTITASGDLVPLSYIAGLVTGRPNSVATAPDGTKVNAAEAFKIAGIQHGFFELQPKEGLAMVNGTAVGSGLASMVLFEANILGILAEVLSAVFCEVMNGKPEYTDHLTHKLKHHPGQIEAAAIMEHILEGSSYMMLAKKLGELDPLMKPKQDRYALRTSPQWLGPQIEVIRAATKSIEREINSVNDNPLIDVSRGKAIHGGNFQGTPIGVSMDNTRLAIAAIGKLMFAQFSELVNDFYNNGLPSNLSGGRNPSLDYGFKGAEIAMASYCSELQFLGNPVTNHVQSAEQHNQDVNSLGLISARKTSEAIDILKLMSSTFLVALCQAIDLRHLEENVKNAVKNCVKMVARKTLSTNDSGHLHSARFCEKDLLLTIDREAVFAYADDPCSANYPLMQKMRAVLVEHALANGEAERDVQTSVFAKLAAFEQELRAVLPREVESARCAVENGTAAQQNRITECRSYPLYRFVRKELGTEYLTGEKTRSPGEEVDKVFVAMNQGKHIDALLECLKEWNGEPLPIC

SEQ ID NO: 109 - protein, 713 aa, Festuca arundinacea
MECENGHVAANGDGLCVAQPARADPLNWGKAAEELSGSHLDAVKRMVEEYRRPVVTMEGASLTIAMVAAVAAGADTRVELDESARGRVKESSDWVMNSMANGTDSYGVTTGFGATSHRRTKEGGALQRELIRFLNAGAFGTGSDGHVLPAATTRAAMLVRVNTLLQGYSGIRFEILETIATLLNANVTPCLPYRGTITASGDLVPLSYIAGLVTGRPNSVATAPDGSKVNAAEAFKIAGIQHGFFELQPKEGLAMVNGTAVGSGLASIVLFEANILGILAEVLSAVFCEVMNGKPEYTDHLTHKLKHHPGQIEAAAIMEHILEGSSYMMLAKKLGELDPLMKPKQDRYALRTSPQWLGPQIEVIRAATKSIEREINSVNDNPLIDVSRGKAIHGGNFQGTPIGVSMDNTRLAIAAIGKLMFAQFSELVNDFYNNGLPSNLSGGRNPSLDYGFKGAEIAMASYCSELQFLGNPVTNHVQSAEQHNQDVNSLGLISSRKTAEAIDILKLMSSTFMVALCQAIDLRHIEENVKNAVKNCVKTVARKTLSTNDSGHLHNARFCEKDLLLTIDREAVFAYADDPCSANYPLMQKMRAVLVEHALANGEAEQDVQTSVFAKLATFEQELRAVLPKEVESARCSVENGTAAQQNRISECRSYPLYRFVRKELGTEYLTGEKTRSPGEEVDKVFVAMNQGKHIDALLECLKEWNGEPLPIC

SEQ ID NO: 110 - protein, 323 aa, Festuca arundinacea
MAFSGSVSGVVLVVAILLLGLAAAASAQLSATFYDASCPSALATIKSAVTAAVNNEARMGASLLRLHFHDCFVQGCDASVLLNDTANFTGEQTAFPNRNSIRGLNVIDNVKAQVEAVCTQTVSCADILAVAARDSIVALGGPSYTVPLGRRDSTTASLSEANRDLPPPSSDLADLVGNFSRKGLSVTDMVALSGAHTIGRAACLNFRSRIYGESNIAPAYAASLQANCPQSAPNGDGTLAPLDVSTPDAFDNAYYGNLLSQQGLLHSDQQLFNGGSTDSLVSTYASNAAQFSGDFAAAMVNMGNIGVLTGAQGEIRLNCGKVN

SEQ ID NO: 111 - protein, 344 aa, Lolium perenne
MASSSSPFSRVSQLAVKATVLAAVCLLLHGGGGSSASAAELCVSYYDHTCPDAYKIVQGVLVEAHKSDPRIFASLIRLHFHDCFVLGCDGSLLLDTFPGFQSEKDARPNNNSARGYPVVDAAKAALEKACPGVVSCADILALAAEISVQLSGGPGWGVLLGRLDGKTSSIAGAQNLPGPFDGLKNLTLKFQAVNLDVTDLVALSGAHTFGRVKCRFVTNRLYNFSGTNQPDPTLNAAYRAFLSTRCPRNGDANSLNDLDPTTPDTFDKNYFTNLEKNRGFLDSDQQLKSDPGALTTTAPIVDRFASSQDAFFKSFAWSMIKMGNILPITDPSRGEVRKHCAFVN

SEQ ID NO: 112 - protein, 326 aa, Festuca arundinacea
MATRGVMVALLLAAVAASCAHAQLHEKFYSESCPSVEDVVRKEMVMALSLAPSLAAPLLRMHFHDCFVRGCDGSVLLDSANKTAEKDALPNQTLRGFDFVERVKAAVEKACPDTVSCADVVTLIARDAVWLSKGPFWEVPLGRRDGSVSISNETDALPPPTANITVLTQLFAAKNLDIKDLVVLSAAHTIGTSHCFSFSDRLYNFTGLDNASDIDPTLEPFYMAKLKSKCTSLDDNSTLVEMDPGSFKTFDLDYFKLVSKRRGLFHSDGALLTDAFTRAYILRHATGAFKDEFFADFAVSMVKMGNTDVLTGSQGEIRKKCSVVNH

SEQ ID NO: 113 - protein, 358 aa, Lolium perenne
MASSRVLLLVVAALAISVSATAAATKISAPLPPLAKGLNFDFYKATCPQAESIVFNFLRDAIRKDVGLAAALLRIHFHDCFVQGCDGSVLLDKTGGTDSEKIAPPNVTLRPTAFKAINDLRALLAKACGAVVSCADIAALAARDSVHLAGGPHYPVPLGRRDGLAPANLTTILNALPAPSSNVTTLLRFLAKISLDANDLVALSGAHTLGIAHCTSFQERLFPQNDVTLNKWFASQLRLTCPALNTDNTTNNDIRTPNVFDNKYYVDLLNRQGLFTSDQDLHTDARTKPTVTRFAVDQAAFFDQFVFSVVKMGQINVLTGSQGQIRNDCSAPNKGRTNDDLPWSVLETVTEAAQSLVL

SEQ ID NO: 114 - protein, 344 aa, Lolium perenne
MTTMGGSSILPAPTVATTALVLLIVLFASPATVAKGSGLSVGFYKKLCPKAEKVVRRTVTKAFEKEPGTPADIIRLFFHDCFVRGCDASVLLESTPGRMAERDSKANNPSLDGFEVISDAKETLEKLCPQTVSCADILALAARDGAYLASGLDYAVPTGRRDGLVSKEDEVLPSVPHPDFNHSQLVENFTAKGFTAEEMVTLSGAHTIGTSHCSSFTDRLYNFSQGGALTTDPALPAAYAALLKEKCPPETAAQNDTTMVQLDDVTPFVMDNQYYKNLLAGTVPLGSDVALMESPDTAALVELYAREPAEYWAKRFVAAMVKVSEMEVLTGAEGEIRLNCSKVN

SEQ ID NO: 115 - protein, 293 aa, Lolium perenne
TRENYYGSSCPTALLTIRTVVTTAVLLDHRMGASLLRLHFHDCFVQGCDASVLLDDTAGFTGEKGAGPNAGSLRGLEVIDKIKMLLEFMCPRTVSCADILAVAARDSVVRLGGPSWAVQLGRRDATTASASLASSDLPGPNSNLNDLLTAFSKKGLSTTDMVALSGAHTIGRAQCQNYRNRIYTDTDIDGAFAASLRGGCPQAGGDGNLAPLDASSPNTFDNGYFSGLLSRQGLLHSDQALYDGGSTDDLVRTYASNNDQFGSDFAAAMVKLSNIGLLTGSSGEIRVNCRAVN

SEQ ID NO: 116 - protein, 311 aa, Festuca arundinacea
MASASCISLVLLVALAATAASAQLSSTFYDTSCPRALATIKSGVAAAVSSNPRMGASLLRLHFHDCFVNGCDASVLLSGNEQNAPANAGSLFGFGVIDNIKTQLEGICKQTVSCADILTVAARDSVVALGGPSWTVPLGRRDSTSATGNTGDLPGPGSSLAQLQAAFAKKNLNTVDMVALSGAHTIGRAQCQNFRSRIYGGDSNINAAFATSLKANCPQSGGNGNLAALDATTANAFDNAYYTNLLSQKGLLHSDQVLFNNGSTDNTVRNFASSGAAFSSAFATAMIKMGNISPLTGTQGQIRLSCSKVNS

SEQ ID NO: 117 - protein, 230 aa, Lolium perenne
MAVSELEVDGVVFPPLARPPGTAHAHFLAGAGVRGMELGGNFIKFTAIGVYLQADAAVSALATKWAGKPADELAADNAFFRDVVTGEFEKFTPVTMILPLTGAQYSEKVTENCVAYWKAVGKYTNAEAAAVDKFKEAFRTESFPPGASILFTHSPAGVLTVAFSKDSSVPESGGVAIENRPLCEAVLESIIGEHGVSPAAKLSLATRVAELLNEAAPVGQAAAEPVSVSA

SEQ ID NO: 118 - protein, 231 aa, Festuca arundinacea
MAVSELEVDGVVFPPLARPPGTAHAHFLAGAGVRGMELGGNFIKFTAIGVYLQADAAVSALAAKWAGKPADELAADNAFFRDVVTGEFEKFRRVTMILPLTGAQYSEKVTENCVAYWKAVGKYTDAEAAAVDKFKEAFKAESFPPGASILFTHSPAGVLTVAFSKDSSLPESGGVAIENRPLCEAVLKSIIGKHGVSPAAKLSLATRVAELLKEAAPVGEPAVAEPVSVSA

SEQ ID NO: 119 - protein, 394 aa, Lolium perenne
MAATMTVEEVRKAQRAEGPATVLAIGTATPANCVYQADYPDYYFKITKSDHLADLKEKFKRMCDKSQIRKRYMHLTEEILEENPNMCAYMAPSLDARQDIVVVEVPKLGKAAAQKAIKEWGQPRSKITHLVFCTTSGVDMPGADYQLTKMLGLRPSVKRLMMYQQGCFAGGTVLRLAKDLAENNRGARVLVVCSEITAVTFRGPHESHLDSLVGQALFGDGAAAVIIGADPDVSVERPLFQLVSASQTILPDSEGAIDGHLREVGLTFHLLKDVPGLISKNIERALEEAFKPLGIDDWNSVFWVAHPGGPAILDMVEAKVNLNKERMRATRHVLSEYGNMSSACVLFIMDEMRKRSAEDGHTTTGEGMDWGVLFGFGPGLTVETVVLHSMPIAA

SEQ ID NO: 120 - protein, 196 aa, Festuca arundinacea
MYFVSKSLAENAAMDYAKENGVDFISIIPTLVVGPFLSAGMPPSLVTALALITGNEAHYSILKQVQLVHLDDLCDSMTYLFEHPDANGRYICSSHDTTIHGIARMLKERFPEYDIPQKFPGADDDLQPIHFFFKKLLDHGFRFRYTAEDMFDAAVWTCREKGLIPLGAEGAGGPASAAGKLGAVLVGEGQAIGAET

SEQ ID NO: 121 - protein, 329 aa, Lolium perenne
MATEAKGETVLVTGASGFIGSWLVRLLLARGYSVHAAVLNPDDKAETDHLLALAAAAGDEGRIRFFRCDLLDGAAMLAAVRGCSGVFHLASPCTVNLVLNPQKELVVPAVEGTLNVLRAAKEAGGVRRVVVTSSVSALVPCPGWPAGEVLDERCWTDIDYCDKNGVWYPASKALAEKAAWKFAEENGLDVVTVNPGTVLGEMIPPRLNASMAMFLRLLEGCKEEYADFFIGPVHVEDVALAHILLYENPSASGRHLCVEPICHWSVFAAKVAELYPDYKVPKFPEDTQPGLVRAKAVPKKLMALGLQFTPLEKIIRDAVESLKSRGCIA

SEQ ID NO: 122 - protein, 328 aa, Lolium perenne
GSTKGKVCVTGASGFVASWLIKKLLESGYHVIGTVRDPGNRRKVGHLWKLPGANERLQLVRADLLEEGSFDDAVRACEGVFHIASPVLGKSDSNCKEATLGPAINGTLNVLRSCKKSPFLKRVVLTSSSSAVRIRDETQQPELLWDETTWSSVPLCEKLQLWYALAKVFAEKAALDFAKENNIDLVTVLPSFVIGPSLSHELCTTASDILGLLQGDTDRFTLYGRMGYVHIDDVARSHILVYETPEATGRYLCSSVVLDNNELVGLLAKQFPVFPIPRRLKNPYGKQAYQLDTSKLQGLGLKFKGVQEMFNDCVESLKDQGHLLECPL

SEQ ID NO: 123 - protein, 369 aa, Lolium perenne
MAPVVERAPFLPTGEATLRPSFVRDEDERPKVAHDRFSDEVPVISLHGIDDARRTEIRDRVAAACEGWGIFQVVDHGVDAALIAEMARLSRDFFALPAEDKLRYDMSGGKKGGFIVSSHLQGETVQDWREIVTYFSYPVKARDYGRWPDKPAGWRAVVEQYSERLMALSCKLLGVLSEAMGLETEALSKACVDMDQKVVVNFYPKCPQPDLTLGLKRHTDPGTITLLLQDLVGGLQATRDGGNTWITVQPIAGAFVVNLGDHGHYLSNGRFKNADHQAVVNGESSRLSIATFQNPAPDAKVWPLAVREGEDTILEEPITFTEMYRRKMARDLELAKRKKQAKADQLKQQLQQEAAPAAAPTKPLNQILA

SEQ ID NO: 124 - protein, 380 aa, Festuca arundinacea
MASVENAPFLPTAATGEATLRPSFVRDEDERPKVAHDRFSDEVPVISLHGIDDGGARRAEIRDRVAAACEGWGVFQVVDHGVDAALVAEMARLSREFFALPAEDKLRYDMSGGKKGGFIVSSHLQGETVQDWREIVTYFSYPVKARDYGRWPEKPAGWRAVVEQYSERLMALSCKLLGVLSEAMGLETEALSKACVDMDQKVVVNFYPKCPQPDLTLGLKRHTDPGTITLLLQDLVGGLQATRDGGNTWITVQPVPGAFVVNLGDHGHYLSNGRFKNADHQAVVNGESSRLSIATFQNPAPEAKVWPLAVREGEDTILEEPITFTEMYRRKMACDLELAKRKKQAKADQLKQQLQQEQQEAVAAAAPKPATTKPLNQILA

SEQ ID NO: 125 - DNA, 2105 bp, Lolium perenne
acttagccttcctcggaaccatcgaccgggccgccgccgacgcgacgcgacgcgatggagtccagcgccgtcgtccccggcaccacggcgccgctgcttccttatgcgtacgcgccgctgccgtcgtcctccgacgacgcccgtgaaaacagaagtagcggcggcgtgaggtggcgcgcgtgcgccgccgttctggcggcctcggcgttggcggtggtggtcgtggtcgggctcctcgcgggcggcagggtggatcgggtcccggccggcgcagacgtggcgtcggccacggtgccggccgtgccgatggagttcccgaggagccggggcaaggacttgggcgtgtcggagaagtcctccggtgcctactccgccgacggcgggttcccgtggagcaacgccatgctgcagtggcagcgcaccgggttccatttccagccggagcagcactacatgaacgatcccaacggccccgtgtactacggcggatggtaccacctcttctaccagcacaaccccaagggcgacagctggggcaacatcgcctgggcccacgccgtgtccaaggacatggtcaactggcgccacctcccgctcgccatggttcccgaccagtggtacgacagcaacggcgtcctcaccggctccatcaccgtgctccccgacggccaggtcatcctgctctacaccggcaacaccgacaccctagcccaggtccagtgcctcgccacgcccgccgacccgtccgacccgctcctccgcgaatggatcaagcaccccgccaaccccatcctcttcccgccgcccgggatcgggctcaaggacttccgcgacccgctcaccgcctggttcgaccactccgaccacacctggcgcaccgtcatcgggtccaaggacgacgacggccacgccggcatcatcctcagctacaagaccaaggacttcgtcaactacgagctcatgcccgggaacatgcaccgcgggcccgacggcaccggcatgtacgagtgcatcgacctctaccccgtcggcggcaactcgtcggagatgctcggcggcgacgactcgcccgacgtgctcttcgtgctcaaggagagcagcgatgacgaacgtcacgactactatgcgctcggaaggttcgacgccgtcgccaacgtttggacgcccatcgaccgggacctggaccttgggatcgggctcagatacgactggggaaagtactacgcctccaagtccttctacgaccagaagaagaaccgccgcatcgtatgggcatacatcggcgagaccgactccgagcaggccgacatcaccaagggatgggccaatctcatgacgattccaagaacggtggagcttgacaggaagacccgcacaaacctcatccaatggccagtggaggaggtcgacaccctccgcaggaactccacggacctcggtcgcatcaccgtcaacgccggctccgtcattcgcctccccctccaccagggcgctcaactcgacatcgaggcctccttccaactcaactcttccgacgtggatgctatcaacgaggccgacgtcggctacaactgcagcaccagcggtgccgccgtacggggggcgctcggcccctttggcctcctcgtccttgccaatggccgcaccgaacagacggctgtgtacttctacgtgtccaagggcgtcgacggcggcctccagacccacttttgccacgacgagtcacggtcaacacgggcaaaggatgtcgtgaataggatgattggcagcatcgtgccggtgcttgacggtgagaccttttcggtgagggtgctagtggaccactccatcgtgcagagcttcgcgatgggcgggaggatcacggcgacgtcgcgggcgtacccgacggaggccatctacgcggccgcaggggtctacctcttcaacaacgccacgggcgccaccgtcaccgccgagaggctcgtcgtgcacgagatggcctcagctgacaaccatatcttcacgaacgacgacttgtagatgaaaccaagtttagctcgtgttgcattcttgttaacggccggtgattgcctatctacacattcatttggcgttcaaaaaaaaaa

SEQ ID NO: 126 - DNA, 2068 bp, Festuca arundinacea
cccatccaccggagtatactaggaaattcctgcaactcgacctcgcgttgggaattccggcaatggagtcccgggcctttcccaacgcggcgtacgcgccacttctgccacccaccgctgacgacgccaccctgggcaagcaggaccgccccggcgtggggtggcgcgggttcttaaccgtgctggccgcgtctggcgtggtggtgctcctcgtcgctgccactatgctcgcgggatccaggatgggtcaggcaggcgacaccgacgaggacggggccggagggttcccgtggagcaacgagatgctgcagtggcagcgcgccgggttccattaccagcccgaggggcacttcatgagcgatccagacggtccggtatactaccgtggatattaccacctcttctttcagtacaaccgaaggggcgtcgcgtgggatgactacatagagtggggccacgtggtgtcccaggacctggtacactggcgccctctcccactggccctgcggcctgaccattggtacgacaagaagggcgtcttgtcgggtaccatcacggtgctccacaatggcacgctcgtcctgctctacacgggggtcacagaagaccctatggccgagtctcagtgcatcgccgtcccgaccgaccccaacgaccccctccttcgccattggaccaagcaccccgccaaccctgttctcgctcacccacagggggtccagggcatggacttccgagaccccaccagtgcatggtttgacaagtccgacgccacgtggcgcattctcatcggttccaaggatgacgacaatggaagccacgctggcatcgccttcatcttcaagaccaaggacttccttagcttcgagcgcgtcccaggtatcgtgcatcgtgtcgagggtaccggtatgtgggagtgcatcgacttttaccccgtcggaggtggccacaactcttcgtcggaggagctgtacgtgataaaggcgagcatggacgacgaacgacacgactactactcattggggagatatgacgcggcagccaacacatggacgccattggacgccgagctagacttggggattgggctgagatacgactggggcaagctctacgctgccacgtcgttctacgatccgctgaagcagcggcgaattatgttggggtatgtaggcgagaccgactctgcacgagccgacgttgccaagggatgggcctcacttcagtcgattccgaggacagtgacactagacgagaagaccaggacgaacctcctcctatggccggtggaggaggtggaggccctccgctacaactccaccgacctcagtggcatcactgttgacaacggctcagtcttccacctccccctccaccaagccactcagctggacatcgaggcttccttccgcctcgacgcttctgacgttgccgccatcaacgaggccgatgtcggctataactgcagcagcagcggtggcgcggccgcacgtggcgctatcggccccttcggcctcctcgtccatgccgccggagacctccgtggcgagcagacggcggtgtacttctacgtgtccagggccctcgacggtaccctccggactagcttctgcaacgacgagacgcggtcgtcacgggccagggacgtgacgaagcgggtggtgggcagcacggtgccggtgctccacggtgaggcgttgtcgatgagggtgctcgtggaccactccatcgtgcagagcttcgccatgggtgggagagtcacggcgacctcgcgggtgtacccaacggaggccatctacgccagggcaggggtgtacctgttcaacaacgctaccggcgccagcgtgactgcggagaggctcatcgtgcacgagatggcctcggcggtatacgacgagaccctgatcatggttgaggactcgtagctgctcacatgagctatatatcagaccggtaacgttgggtcacttgcatttccaagcgttgaataatttacttagcttagcaagcaacaggtccgaggttccaagtaaggtgtgggatattcttccaaaattcaaaaaaaaaa

SEQ ID NO: 127 - DNA, 2198 bp, Lolium perenne
cacccatccaccggaatatatatactagccaggaaattcctgcaactcgacctcgagttgggaattccggcaatggagtcccgggcctttcccagcgcggcgtacgcgccacttctgccatccgccgcagacgacgtcgccctggccaagcaggaccgccccggcgtggggtggcgcgggttcttaaccgtgctggccgcctgcggcgtggtggtgctcctcgtcggtgccactttgctcgcgggatccaggatgggtcaggcaggcgacggcgaaggcaacaccgacgaggatggggccggagggttcccgtggagcaacgagatgctgcagtggcagcgcgccgggttccattaccagccggaggggcacttcatgagcgatccaaacggtccagtatactaccgcggatattaccacctcttctttcagtacaaccgaaggggcgtcgcgtgggatgactacatagagtggggccacgtggtgtcccaggacctggtacactggcgccctctcccactggccatgcggcctgaccattggtacgacaagaagggcgtcttgtcgggtaccatcacggtgctccacaatggcacgctcgtcctgctctacacgggggtcacagaagaccctatggccgagtcccagtgcatcgccgtcccgaccgaccccaacgaccccctccttcgccattggaccaagcaccccgccaaccccgtcctcgctcacccacagggggtccagggcatggacttccgagaccccaccagcgcgtggtgggacaagtccgatgccacgtggcgcattctcatcggttccaaggacgacgacaacggcagccacgctggcatcgccttcatcttcaagactaaggacttccttagcttcgagcgtgtcccaggtatcgtgcatcgtgtcgagggcaccggcatgtgggagtgcatcgacttttaccccgtcggaggtggccacaactcttcgtcggaggagttgtacgtgataaaggcgagcatggacgacgaacgccacgactactactcattggggaggtacgacgcggcagcgaacacatggacgccattggacgccgagctagacttggggattgggctgagatacgactggggcaagctctacgcttccacgtcgttctacgatccggtgaagcagcggcgcattatgttggggtatgtaggcgaggtcgactctgcgcgagccgatgttgccaagggatgggcctcgcttcagtcgattccgaggacagtggcgctagacgagaagacccgaacgaacctcctcctatggccggtggaggaggtggaggccctccgctacaactccaccgacctcagcggcatcaccattgacaacggctccgtcttccacctcccactccaccagaccactcagctggacatcgaggcttccttccgcctcgacgcttctgatgttgccgccatcaacgaggccgacgtcggctacaactgcagcagcagcggcggcgcggcggcacgtggcgctctcggccccttcggcctcctcgtccatgccgccggagacctccgtggcgagcagacggcggtctacttctacgtgtccagggccctcgacggtaccctccggaccagcttctgcaacgacgagacgcggtcgtcgcgggccagggacgtgacgaagcgggtggtgggcagcacggtgccggtgctcgacggcgaggcgttgtcgatgagagtgctcgtggaccactccatcgtgcagagcttcgcgatgggcgggaggaccacggcgacctcgcgcgtgtacccgacggaggccatctacgccagggctggggtgtacctgttcaacaacgccaccggcgccggcgtgacggcggagaggctcatcgtgcacgagatggcctcggcggtatacgacgagaccctcatggttgaggactcatagctgctcacccgtaacgttgggtcacttgcatttccaagcgttgaattaataatttacttgttgtagcagcaagcaacggtccgaggttccaagtaaggtgggatattctaccaaactccgcgagtcccgcaaggttgtgtaggtgtgagttgatgttggcgcacctgcgcgtgtgcatgtaagttgttgtatttgttgttcttttaaaaaagaaagataccaatctaccatactatgtaagcataaaaaaaaaa

SEQ ID NO: 128 - DNA, 2208 bp, Lolium perenne
cacccatccaccggagtatactagctaggaaattcctgtgcaactcgacctcgagtttggaattccggcaatggagtcccgggactttcccagcgcggcgtacgcgccacttctgccatctgccgcagacgacgtcgccctggccaagcaggaccgccccggcgtggggtggcgcggcttcttaaccgtgctggccgcctgcggcgtggtggtgctcctcgtcgctgcctctttgctcgcggggtccaggatgggtcaggcaggcgacaccgacgaggacggggccggagggttcccgtggagcaacgagatgctgcagtggcagcgcgccgggttccattaccagccggaggggcacttcatgagcgatccagacggtccggtatactaccgtggatattaccacctcttctttcagtacaaccgaagaggggtcgcgtgggatgactacatagagtggggccacgtggtgtcccaggacctggtacactggcgccctctcccactggccatgcggcctgaccattggtacgacaagaagggcgtcttgtcgggtaccatcacggtgctccacaatggcacgctcgtcctcctctacacgggggtcacagaagaccctatggccgagtcccagtgcatcgccgtcccgaccgaccccaacgaccccctccttcgccattggaccaagcaccccgccaaccccgttctcgctcacccacagggggtccagggcatggacttccgagaccccaccagcgcgtggtgggacaagtccgactccacgtggcgcattctcatcggttccaaggacgacgacaacggcagccacgctggcatcgccttcatcttcaagaccaaggacttccttagcttcgagcgtgtcccaggtatcgtgcatcgtgtcgagggtaccggcatgtgggagtgcatcgacttttaccccgttggaggtggccacaactcttcgtcggaggagttgtacgtgataaaggcgagcatggacgacgaacgacacgactactactcattggggaggtatgacgcggcagcgaacacatggacgccattggacgccgagctagacttggggattgggctgaggtacgactggggcaagctctacgcttccacgtcgttctacgatccactgaagcagcggcgaattatgttggggtatgtaggcgaggtcgactctgcgcgagccgacgttgccaagggatgggcctcacttcagtcgattccgaggacagtggcactagacgagaagacccggacgaacctcctcctatggccggtggaggaggtggaggccctccgctacaactccaccgacctcagcggcatcactgttgagaacggctccatcttccacctccctctccaccaagccactcagctggacatcgaggcttccttccgcctcgatgcttctgatgttgctgccatcaacgaggccgacgtcggctacaactgcagcagcagcggtggcgcggccgctcgtggcgctctcgggcccttcggcctcctcgtccatgccgccggagacctccgtggcgagcagacggcggtgtacttctacgtgtccagggccctcgacggtagcctccggaccagcttctgcaacgacgagacgcggtcgtcacgggcccgggacgtgacgaagcgggtggtgggcagcacggtgccggtgctcgacggcgaggtgttagcgatgagggtgctcgtggaccactcgatcgtgcagagcttcgcgatgggtgggagggtcacggcgacgtcgcgggtgtacccaacggaggctatctacgccagggcaggggtgtacctgttcaacaacgccaccggcgccagcgtgacggcggagaggctcatcgtgcacgagatggcctcggcggtatacgacgagaccgtcatggttaaggactcatagctgctcacacatgagctatcagaccggtaacgttgggtcactagcattttcaagcgttgaaataatttacttggcgtagcaagccccgggtccgaggttccaaaagtaaggtgggatattcttccaaactccgcgagtcccgcaaggttgtctaggtgtgagtgtgatgtcgtttgcgcacctgcgcgtgtgcttgtaatttgctggatttgttgtttctttacagaaaaaaaaggatactatactatgtaagtatctacattgttgtaaaaaaaaaa

SEQ ID NO: 129 - DNA, 1790 bp, Festuca arundinacea
caccaacgaaattcgggaggaagaaaggcgctcgcccatctctcccgaaacaaccgctcgccacccgtctccctcccctgccctcgcctccccattccccttcctcttcttcccttggcgacggcctcgtcgatcggacccaatctccaccaaacgcgcctccggatctcgcgcgccgcctcgaaggggatcctcccgtggccgccgtcctcctccgccgctcggctggactgtcgtggagcggggatcgacccgggctctctgtcgctggttgctaaaatggataagctcaatggttctgcgcgtcttatgattgtttcagacctcgatcatacaatggttgatcatcatgacgaagagaacttgtcgttgcttaggtttggggccctttgggagtctgcttactgtcaggattctctacttgtcttctcgaccggaagatcacccactctctataaggaattgaggaaagagaagcctatgctaactccagacatcactattatgtcggtgggcagtgagataacttatggtgaggccatggttcctgatgatggctgggaggaatatctgaacaataagtgggacagaaatattgttcttgaggagaccgctaagtattctgagctgaagcttcagccagagacagaacagcgtccacataaggtcagcttcttggttgacaagaagagtgctcaggaagtgataaagtctctctctgagaagtttgagaaacgtggggtagatgcaaaaataatctatagtggtggccaagaccttgacatattagctcaaggggctggaaagggtcaggcgcttgcatatttactcaagaagttcgcctcatgcgggaaaacacccaacaatactcttgtttgtggtgactctggcaatgatgcagaattattcagcatccctggtgtgcacggtgtcatggttagcaatgcccaagaggaactactccagtggcatgcagaaaatgcgaaggataaccctaaggtaattcatgcaactgagaggtgtgctgctggtattattcaagctattgggcacttcaagctaggacctaatatttctccaagagacattgagtttccttacgtcaaggaggactctttcaagcctacagcggctgttgtgaagttctatgttctctgcgagaagtggcgtagggctgacgttccaaaggctgattcagttatagagtacttcaaaaacatcacggatgcaagtggagttattattcatccctctggcctcgaactttcgatccattcttccatcgatgcgttggcttcatgttatggtgacaaacaagggaaaaagtaccgatcatgggtggacagactagttatctcacagactgcttctgacagttggcttgtgagatttgacttgtgggaggcagaaggtgatgcatgggtgtgctgtttgacaactcttgcgctgaatgtaaagcctgaaacccctgggggtttcgtggtaacacacatccacaagacatggctcaaagaatattccggggatgagcaggcgtccaaactctagactggatctctaccgtcagcgcacgggaaggaaattttcttgagaatcaaataagaagcgcacagaaaacacgagaatttcttttccttgttcataatgttaataagtgctcccagacactacatatatcatactggatgaagtatacggaggtcttgatgcttggcctaatgcttacttgatgtgtaagataaaaatattatatctcgttactggcatgagaagctgaagtaaaaaaaaaa

SEQ ID NO: 130 - DNA, 3633 bp, Festuca arundinacea
gcagagtagcctgcctgctcgccggcgagagatagctagggagggagggtaactagcgcaggaggagcctgctcgcctgccgtcgagatggcggcggggaacgagtggatcaacgggtacctggaggcgatcctggacgccgggtcgaagctgcggccgcagggcgtgcagctgccgccgctggagacggcgccggcgctcgcggccgaggagtccggcgccgcctacaaccccaccaggtacttcgtggaggaggtggtcaggagcttcgacgagcaggccctccacaagacatggacaaaggtggttgcgatgcggaacagccaggagcgcagcaaccggctggagaacctgtgctggaggatctggaacgtctccaggcagaagaagcaggtggagtgggattacacgaaagaggtggcccggcggaagcttgagcaggagctgggcagccgggaggccgccgaggacctctccgagctctccgagggcgagaaggataccaccaccgccaagcctgacgccgcaaccgctcaaccgtccaccgacgatggcgagcaccagcagccacaaccacgcacccggctcgcgaggatcaactccgaggtgcggctcgtctccgacgacgaggaggagcagaccaagaagaggaacctctacatcgtcctcatcagcatccatgggctggtgcgcggggagaacatggagctcggccgagactccgacaccggaggccaggtgaagtacgtggtggagctggcccgtgcgctggcggccacggcgggggtgcaccgcgtggacctgctgacgcggcagatctcctgccccgacgtggactggacctacggcgagccggtggagatgctggagcgcctgtcgtcggcggacgcggacgaggacgacggcgagcagtctggcggcggggcgtacatcgtgcggctgccgtgcgggcccagggaccagtacatccccaaggaggagctgtggccgcacatcccggagttcgtggaccgcgcgctctcgcacgtcaccgaggtggcgcgcgcgctaggcgaccagctccagcctcctcccactccggccgcgggcgacggcgcagccctagtggcagcgcccatatggccgtacgtgatccacggccactacgcggacgcggcggaggtggcggcgaacctggcgagcgcgctgaacgtgcccatggtcatgacgggccactcgctggggcgcaacaagctggagcagctgctcaagctgggccgcatgccgggccccgagatccagggcacctacaagatcgcgcgccggatcgaggccgaggagaccggcctcgacaccgcggagatggtggtcaccagcaccaagcaggagatcgaggagcagtggggcctctacgacggcttcgacctcatggtggagcgcaagctcagggtaaggcagcgccgcggcgtcagcagcctcggcaggtacatgccgcgcatggcggtcatcccgcccggcatggacttcagcttcgtcgagacacaggacacggctgagggggatggcgccgacctgcagatgctcattgcccccgacaaggccaagaaggctctgcctcccatttggtcggacgtgctgaggttcttcacgaacccgcacaagccgatgatcctggcgctgtcgcggccggacccgaagaagaacgtcactacgctgctcaaggcctacggcgagagccgccagctccgggagctcgcgaacctgactttgatactggggaacagggatgacatcgaggacatggccggcggcggcggcgcggtgctcacggcggtgctcaagctcatcgaccgatacgacctctacggccaggtggcctatccaaagcaccacaagcagacggacgtgcctcacatctaccgcctcgctgcaaagaccaagggagtattcaccaacccagctcttgtagagccgttcggcctcacaatcatcgaggctgctgcttacggtttgccggtggtcgcaaccaagaacggagggccggtggacatcctcaaggcgctcaacaacgggctgctggtggacccgcactcggcggaggcgatcaccggcgccctgctgagcctgctggccgagaagtcgcggtgggtggagtgccgccgcaacggcctccgcaacatccaccgcttctcgtggccgcaccactgccgcctctacctctcccacgtctccacctactgcgaccagccctcgccgcaccagcctctccgcgtgcccctcggcctgggctcctcgaccagcttcggcgcagacgactcgctctcggactcgctccgcggcctctcgctccagatatccgtggacgcctccagcgacctcaacgccgcggactccgcggccgccatcatggacgcgctccgccggcgcccggcctccgagaagccggcgagctccggtgccagggcgctcggcttcgcgcccggccggcgggagagcctcctggtggtcgccgtcgactgctacggcgacgacggcaagccggacgtcaagcagctaaagaaggccatcgacgcggcggtgtcggttggtgaatgcgcgggagctaagcaggggtacgtgctgtcgaccggcatgaccatccccgaggccgcggaggcgatcaaggcgtgcggcgccgacgttgccagcttcgacgcgctgatatgcagcagcggggccgagctatgctacccgtggaaggagctcgcggccgacgaggagtactccgggcacgtcgcgttccggtggcccggtgaccacgtgaaatccgccgtgcccaggctcgggagcttggaggagatcgccctcgcaatcgatcgccccgcctgctccgtgcactgccacgcctacgccgccacggacgcatccaaggtgaagaaggtggattcgatcaggaagtcgctgcggatgcgcgggttccggtgcaacctcgtctacacgcgcgcgtgcacgcgcctcaacgtcatccccctctccgcttcccggccgcgcgctctcaggtacctgtcgatacagtgggggatcgatctctccaaggtggcggtgctcgtcggcgagaccggcgacaccgaccgcgagaggctcctcccgggagttcacaagacgctcatcctgccgggaatggtcgcccgcggcagcgaggagctcctccgaggcgacgacgggtacaccatggcggacgtcgtggccatggactcccccaacattgtcacgctcgccgaaggccagtctgcctccgacctcctcaaggccatctgagagcgtgctctgctgctccctgtgctgcttctgttttccacatctgggacgcagtagcttcacttggattgtttcgcctgtgattttggcaggaagatgatgactgcagaattgcatttgcatataccgtatacctgtgcaagcatgagcaaaacatgtcagctaataattctttaatgttttggtcatgcctccgtgaggtatgcttgtgtgcattctataaaagaaaaacgcaagaatgaaagaaagaaatattttcaatgtaagttgatgtttcttcctgacggcttcttacttggattgtctacattaattgtttcaaggaaatacaaggatctcccctctccaaaaaaaaaa

SEQ ID NO: 131 - DNA, 3747 bp, Lolium perenne
ctccgatcccccacccacctcccaatttccccaagccgcatcgcatcacctcgtctcccgagagcaccgcgatggcggggaacgactggatcaacagctacctggaggccatcctcgacgcgggcggcaccgcgggggacatctcggccgcctctgtggccggaggcgatgatgggccgggcgctggcggaggcactgcgggggagaagcgggacaagtcgtcactcatgctccgagagcgcggccggttcaaccccgcgcgctacttcgtcgaggaggtcatctccggattcgacgagacggacctctacaagacctgggtccgcacgtcggccatgagaagcccgcaagagaggaatacgcggctggagaacatgtcctggaggatctggaacctcgctaggaagaagaagcagattgaaggtgaggaagcctcccgtttatcaaagaaacgtcttgaacgtgagaaggctcgtcgagatgctgctgctgatttgtctgaggacctatctgagggagaaaaaggagaaaacattaacggatcatctgttcacgatgagagcacaaggggacgaatgccaaggataggttcaactgatgctattgaggtgtgggcaaatcagcacaaagataaaaaactgtacatagtgctaataagtattcatggtcttatacgtggtgagaatatggagcttgggcgtgattcagatacaggcggtcaggtcaaatatgttgtagagcttgctagggcattaggtgaaacacctggagtatacagagtggatctgctgacaaggcagatttctgcacctgatgttgactggagttacggagaacctacagagatgctgagtccaagaaattctgagaaccttggggatgacatgggtgaaagcagtggtgcttatattgttaggataccttttggaccaagagaaaagtatatacctaaagagcagctctggccccacatacaggaatttgttgatggtgcacttgtccatatcatgcagatgtccaaggttcttggtgaacaagttggtcgtgaacggcgagtatggcctgttgttatccacggacactatgctgatgcaggcgattctgctgctctattatctggggcactcaatgtcccaatggtattcacaggtcattctcttggcagagacaaattagagcaacttttgaagcaaggacgtcaaaccagggacgaagtaaatgcaacatacaagataatgcgtcggattgaagctgaggaactttgtcttgatgcatctgaaattgtaattacaagcactaggcaagaaatagagaaacaatggggattgtacaatggatttgatgtaactatggagaggaaacttagagcaagaacaaagcgtggtgtcagctgctatggtcgttacatgcctcgtatgattgcgattcctcctggcatggagtttagccatattgtgcctcatgatgttgacctggatggtgatgaagcaaatgaagttggctcaggttcaccggatccacctatttgggctgatataatgcgtttcttctcaaaccctcgtaagcccatgattctcgctcttgctcggccagatcccaagaagaacatcactacattggtgaaggcatttggtgaacaccctggattgagaaatttagcaaaccttacactgatcatgggtaaccgtgatgttattgatgaaatgtcaagcacaaatggagctgttttgacctcagtactcaagttaattgacaaatatgatctatatggccaagtggcataccccaagcaccataagcaatctgaagttccagatatttatcgtttggcggcaagaacaaagggggtttttattaattgtgcttatattgaaccatttgggctcaccttgatcgaggctgctgcttatggtctaccgatggttgctacccaaaatggtgggcctgtcgacatacaccgggttcttgacaatggtatccttgttgatccacacaaccaaaatgatattgctgaggcactttataagcttgtttctgataagcacttgtgggcacaatgccgtcagaatggtctggataatatccatcgattttcttggcctgaacattgcaagaactatttgtcacgggttggcacggtgaagcctagacatccacgatggcaaaggagtgatgatgctactgaagtttctgaatcagattcacctggcgattctttgagggatgttcatgatatatctcttaacttgaagctttccttggacagtgaaaaagcaggcaccaagataaatactgaacgaaattccaccaatgccagaagaaatcttgaggatgctgtactaaaattttcaaatgctgttagtgagggcacaaaggatgagtctgatgagaatgctgaggccaccacaggctccaataaatggccatctttacggaggagaaaacacattgttgttattgctgtagattctgtgcaaaatgctgacttggttcagattatcaaaaacctttttgaggcttcacgcaaagaaaaatcatctggtgctgttggttttgtactgtcgacatctcgagcaatatcagagacacttacttttttaacatctgggggcatacaaactactgaatttgatgccttcatatgcagcagtggcagtgatctttgttatccatcttcaagttcggaagacatgcttagccctaccgagcttccatttatgattgatcttgattatcactctcagattgaataccgttggggaggggaaggtttaaggaagacactaattcgttgggcagcagaaaacaacagtcagagtggacaagaagtagttactgaagatgaagaatgttcatccacttactgcatttcatttaaagtgaagaatactgaggctgtccctcctgtgaaggatcttagaaaaacaatgagaattcaagcactgcggtgtcatgtattgtacagccatgatggtagcaagttgaatcttatacctcttctagcatcacgatcccaagcactaaggtacttgtatatacgatggggggtagagctggcaaacatgacagtggttgttggtgaaagtggtgatacagattatgaagggctacttggaggcgtgcacaagaccatcatactcaaaggctcatttaatgctgctccaaaccagcttcatgctgccagaagctattcactggaggatgtcatatcgtttgacaaaccaggaattgcttcagtcgagggatatctcccagatagcttaaaatcagctctacaacagttcggtgtgctgaactaaagtgacaatcttgccatcagcagaacagttaagtagagtatctattctatgtggtccagatcgagaaatgtgcagcaaggcttgtcttcgctgttttaccacgtcttgcatggcagaataagttctggttgaggtttaccttctacaactcttcttgtaaaccaaaagaatttggagctacgaacttggatcagttttttgtccaaggcaaaactcaaggcaataatactgtgccctaccatcagtcacaataaagcaagattgaacatccttcttgagattcgttaatgttttgtaagactagtcatagtggggagtaatttatatgttgtttcatgcattgtattatttattatcttgtaaacccattttgttttggtgtgtgtgatgttattatggtaacatagctagttaccaccctattatatttcttccctcaaaaaaaaaa

SEQ ID NO: 132 - DNA, 3743 bp, Lolium perenne
cacgcgcgcccgtgcgcacacgtatatagcccgatcaatatcaagttgggatctttagcgccggaggagcggagtagcctgctcgccggcgagggtaattagagcaagaggagtctgctcgccgtcaacaaagatggcggcggggaacgagtggatcaacgggtacctagaggcgatcctggacgcggggtcgaagctgcggccgcagggcgtgcagctgccgccgctggagacagcgccggcgctcgcggccgaggagagcagcgccgcctacaacccgaccaggtacttcgtggaggaggtggtcaggagcttcgacgagcaggccctccacaagacatggacaaaggtggttgcgatgcggaacagccaggagcggagcaaccggctggagaacctgtgctggaggatctggaacgtctccaggcagaagaagcaggtggagtgggattacacgaaagaggtggctcggcggaagcttgagcaggagctgggcagccgggaggccgccgaggacctatccgagctctccgagggcgagaaggacaccaccaccgccaagcccgacgccgcagccgctcaaccgtccgccgacgatggcgagcaccagcagccgcagccacgcacccggctcgcgaggatcaactccgaggtgcggctcgtctccgacgacgaggaggagcagaccaagaagaggaacctctacatcgtcctcatcagcatccatgggctggtgcgcggggagaacatggagctcggccgagactccgacaccggtggccaggtgaagtacgtggtggagctggcgcgtgcgctggcggcgacggcgggggtgcaccgggtggacctgctgacgcggcagatctcctgcccggacgtggactggacctacggcgagcccgtggagatgctggagcgcctgtcgtcggcggacgccgacgacgacgacggcgagcaggccggcggcggtgcctacatcgtgcggctgccgtgcgggccaagggaccagtacatccccaaggaggagctgtggccgcacatccccgagttcgtggaccgcgcgctctcgcacgtcaccgaggtcgcccgcgcgctcggcgagcagctccagcctcctccttctccggccgacggcgcggtggcggcgcccatctggccgtacgtgatccacggccactacgcggacgcggcggaggtggcggcgaacctggcgagcgcgctgaacgtgcccatggtcatgacgggccactcgctggggcgcaacaagctggagcagctgctcaagctcggccgcatgccgggccccgagatccagggcacctacaagatcgcgcgccggatcgaggccgaggagacggggctcgacaccgcggagatggtggtcaccagcaccaagcaggagatcgaggagcagtggggactctacgacggcttcgacctcatggtggagcgcaagctccgggtaaggcagcgccgcggcgtcagcagcctcggacggtacatgccgcgcatggcggtcatcccgcccggcatggacttcagcttcgtcgagacacaggacacggctgacggggacggcgccgatctccagatgctcattgctcccgacaaggccaagaaggctctgcctcccatttggtcagacgtgctgcggttcttcacgaacccgcacaagccgatgatcctggcgctgtcgcggccggacccaaagaagaatgtcaccacgctgctcaaggcctacggcgagagccgccagctccgggagctcgcgaacctgacactgatactggggaacagggatgacatcgaggacatggccggtggcggcggcgcggtgctcacggccgtgctcaagctcatcgaccgatacgacctctacggccaggtggcctacccaaagcaccacaagcagacggacgtgcctcacatctaccgcctcgccgccaagaccaagggagtattcatcaacccagctcttgtggagccgttcggcctcacaatcatcgaggctgctgcttatggtttgccggtggtggcgaccaagaacggcgggccggtggacatcctgaaggcgctccacaacgggctgctggtggacccgcactcggcggaagcgatcaccggcgcgctgctgagcctgctggctgagaagtcgcggtgggtggagtgccgccgcaacggcctccgcaacatccaccgcttctcgtggccgcaccactgccgcctctacctctcccacgtctccacctactgcgaccagccctcgccgcaccagccgctccgcgtgcccctcgccctgggctcctccaccagcttcggcgccgacgactcgctctcggactcgctccgcggcctctcgctccagatatccgtggacgcctccagcgacctcaacgccgcggactccgcggccgccatcatggacgcgctccgccggcgcccggcatccgagaagccggcgagctccggtgccagggcgctcggcttcgcgcccggccggcgggagagcctcctggtggtggccgtcgactgctacggcgacgacggcaagcccgacgtcgagcagctgaagaaggccatcgacgcggcggtgtcggttggtgaatgcgcgggagcgaagcaggggtacgtgctgtcgaccggcatgaccatccccgaggccgcggaggcgatcaaggcatgcggcgccgacgttgccagcttcgacgcgctgatatgcagcagcggggccgagctatgctacccgtggaaggagctcgtggccgacgaggagtactccgggcacgtcgcgttccggtggcccggtgaccacgtgaaatccgccgtgcccaggctcgggagcatggaggagatcgccctcgcaatcgatcggcccgcctcctccgtgcactgccacgcctacgccgccacggacgcatccaaggtaagcataacagagcactacttgtagtaaccactaaccagcacggtacatggtctcctccatgcctaagcttctgatgcgtggggttttgggcaggtgaagaaggtggattcgatcaggcaggcgctgcggatgcgcggcttccggtgcaacctcgtctacacgcgcgcctgcacgcgcctcaacgtcatccccctctccgcttcccggccgcgcgctctcaggtacctgtcgatacagtgggggatcgatctctccaaggtggcggtgctcgtcggcgagaccggcgacaccgaccgcgagaggctcctcccgggagtgcacaggacgctcatcctgccggggatggtcgcccgcggcagcgaggagctcctccgaggcgacgacgggtacaccatggcggacgtcgtggccatggactcccccaacattgtcacgctcgcggaaggccagtctgcatccgacatcctcaaggccatctgagagcatgctctgctccttgtgctgcctctgttttccacatcccggacgcagtagctccacttcgattatttcacctgtgattttggcaggaagatgactgcagaattgcatttgcatataccgtatacctgtgcaagcatgagcaaaacatgtcagctaataattcttttatgttttggccatgcctccgtgaggtatgcttgtgtacatactataaaggaacagagagagaaacgcaagaatgaaagagagaaatattttcaatgtaagttgatgtttcttcctgacggcttcttacaatggcttgtctacattaattgtctcaagaaaaaaaaaa

SEQ ID NO: 133 - DNA, 2714 bp, Lolium perenne
cttctcccctcacacgcctcgccatttgttttgtgtcctgagccatggctgccaagctgactcgtctccacagtctccgggagcgccttggtgccaccttctcctcccatcctaacgagctcattgccctcttttcaaagtatgttcaccagggcaaaggaatgcttcagcgccaccagctgctcactgagtttgaagccttgtttgaggctgacaaggagagatatgcaccctttgaagacattctccgtgctgctcaggaagcaattgtgctgcccccatgggttgcactggccatcaggcctaggcctggtgtctgggactacatacgggtgaatgttagcgagttggctgttgaggagctgacagtttccgagtacctggcattcaaggaacagcttgttgatgagcacgccagcagcaagtttgtgcttgagcttgattttgagcctttcaatgcctccttcccacgtccttccatgtccaagtccattggaaatggggtgcagttccttaaccgtcacctgtcttccaagctgttccaggacaaggagagcctctacccactactgaacttcctgaaagcccataaccacaagggcacgacaatgatgctaaacgaccgaattcagagccttcgtgggctccaatcagcccttagaaaggcagaagagtatctaacgagcattcctgaagacaccccgtcctctgagttcaaccacaggttccaagagcttggcttggagaagggttggggcgacaccgctaagcgtgtacaggacaccatccacttgcttcttgatctacttgaggcccctgatccagccagcttggagaagttccttggaactataccaatgatgttcaatgttgttatcctgtctccacacggatattttgctcaatccaatgtgttgggataccctgatactggtggccaggttgtgtacatcttggatcaagtccgtgctttggagaatgagatgcttctgaggattaagcagcaaggccttgacataacccctaagatcctcattgtcaccaggctgttgcctgatgctgttggaactacatgtggccagcggctggagaaagttattgggactgagcacactgacattctccgtgttccattcagaactgagaaggggatcctccgtaagtggatctctcgttttgatgtctggccatacctggagacatacaccgaggatgttgcaaacgaactcatgagagaaatgcagaccaagcctgatctcattattggcaactacagtgacggtaaccttgtcgccactctgcttgcgcataagttgggagttacccagtgcaccattgcccatgctttggagaaaacaaaataccccaactcagacatatatttggacaaattcgacagccaataccatttctcatgccagttcactgctgaccttattgccatgaatcacactgatttcatcatcaccagcacattccaggaaattgctggaagcaaggacagcgtgggccagtatgagtctcacattgctttcaccctccctgatctctaccgtgttgtccatgggattgacgtgttcgatcccaagttcaacattgtctctcctggagcagatatgactgtctacttcccatacactgaaactgacaagaggcttactgccttccaccctgaaattgaagagctcctttacagtgatgttgagaactctgaacacaagtttgtattgaaggacaagaacaagcctatcatcttctcaatggctcgtcttgaccgtgtgaagaacatgacaggcttggttgagatgtttggtaagaatgctcatctgaaggatttggcaaaccttgtgattgtcgctggtgaccatggcaaggagtccaaggatagggaggagcaggctgagttcaaaaggatgtacagtctcattgaggagtacaagctggagggccatatccggtggatctcagctcagatgaaccgtgttcgcaatgcagagttgtaccgctacatttgtgacaccaagggcgcatttgttcagcctgcattctatgaagcatttggcctgactgttgtcgaggccatgacatgtggtttgcccacaatagcgacatgccatggtggcccagctgaaatcattgtgaatggtgtgtctggtttgcacatcgatccttaccacagtgacaaggctgcagatatcctggtcaacttctttgagaaatccacggcagatccaacctactgggacaaaatgtcggaaggtggcctgaagagaatttatgagaagtacacctggaagctgtactcagagaggctgatgaccctgactggtgtatatggtttctggaagtatgtgagcaaccttgagaggcgtgagactcgccgttaccttgagatgttctacgctctgaagtaccgcagcctggctgctgcagttccattggccgtcgatggcgagaacacggacaattagtgcgggacatgaagaggcgccttcaaagggcgaggtgtcggctgcgttatgatttgattgtctaccggagttttcatttggtctattgtggagtgtgtacttggatgtctcaggcacttctgtgaggttttgggcagttctttgctggttcctgctagctgcatatgttgtcttcaataaacgcctgcccgtattgttcatctcttataattcaatgcaatcttctgttgcctaaaaaaaaaa

SEQ ID NO: 134 - DNA, 2957 bp, Lolium perenne
cggtttcttcctcgtggtgcgttgcgtttgtcgggttcttctgaagaagcggaaggtttgagcaatgggggaagccgccggcgaccgtgtgctgagccgcctccacagcgtcagggagcgaatcggcgactccctctccgcccaccccaatgagctcgtcgccgtcttcaccaggctggtcaaccttggaaagggaatgctgcagccccaccagatcatcgctgagtacaacactgcaatccctgaagcagagcgcgagaagctcaaggacggcgccttcgaggatgtactgagggcagcgcaggaggcaatcgtcatctccccatgggttgcacttgccatccgccctaggcctggtgtctgggagtatgtgagagtcaacgtgagcgagcttgctgtcgaggagttgagtgtccctgagtacttgcagttcaaggaacagcttgtggaaggaagcaacaaagacttcgtgcttgagctggactttgagccattcaatgcctccttccctcgtccttccctgtcgaagtccattggcaacggtgtgcagttcctcaataggcacctgtcatcaaagctcttccatgacaaggagagcatgtaccctttgctcaacttcctccgtgcacacaactacaagggcatgcctatgatgatgaacgacagagtccgcagtctaagtgctctccagggagctctgaggaaggccgaggagcatctgtctggtcttccagcagacaccccgtactcggacttccaccacaggttccaagaacttggtttggaaaagggctggggtgattgtgccaagcgtgcgcaagagacccttcacctgctcctcgaccttcttgaggcacctgacccgtccacacttgagaagttccttggtacaatcccaatggtgttcaatgttgtcatcctctctccacatggttactttgcacaagccaatgtcttggggtaccctgacaccggagggcaggttgtctacattttggatcaagtccgtgctatggagaatgagatgcttttgaggatcaagcagcaaggactcgatatcacaccacggatccttattgttaccaggcttctccctgatgcaaccggtacgacctgcggtcagcgtcttgagaaggtcctcggtactgagcacacccacatccttcgtgtgccattcagaactgaaaatggaattgttcgcaaatggatctcacgttttgaagtctggccatacctggagactttcactgatgatgtggcgcacgagatttctggagagctccaggccaaccctgacctgatcatcggaaattacagtgatggaaaccttgttgcatgtttgcttgcacacaagatgggcgttactcattgtaccattgcgcatgcgcttgagaaaaccaagtaccccaactctgacctgtactggaagaagtttgaggatcactaccacttctcatgccagttcaccactgacttgattgcaatgaaccacgcggacttcatcatcacaagtaccttccaagagattgctggaaacaaggacaccgttggtcagtacgagtctcacatggcattcacgatgcctggaatgtaccgtgttgtccacggtatcgatgtttttgaccccaagtttaacatagtttcgcctggtgcggacatgtccatctacttcccgtactcagagtcacaaaggaggctcacctcactccacccagagattgaggagctgctctacagtgatgtcgacaacgatgagcacaagtttgttctgaaggacaggaacaagccaatcatcttctcgatggctcgtctggaccgtgtcaagaacttgactggtctggttgagctgtatggccggaaccctcgcttgcaggagcttgttaaccttgtggttgtttgtggtgaccatggcaacccatcaaaggacaaggaggagcaggctgagttcaaaaagatgtttgaccttattgaacagtacaacctgaatggccatatccgctggatctctgctcagatgaaccgtgtccgtaatgctgagctctatcgctacatctgcgacaccaagggtgcttttgtgcagcctgcattctatgaggctttcgggctaactgtcatcgaggccatgacctgtggtcttccaacatttgcaactgcatatggtggtccagctgagatcatcgtgaacggtgtctccggctaccacattgatccttaccagggtgacaaggcctcggctctgctcgttgagttctttgagaagtgccagggagaccacagccactggaccaagatctcactgggagggcttcagcgtattgaggagaaatacacctggaagctttactctgagaggctgatgaccctcaccggtgtctatggcttctggaagtacgtctccaaccttgagaggcgtgagacccgccgctacctggaaatgctgtacgcgctcaagtaccgcaccatggccagcactgttccattggctgtcgagggggagccctcgagcaagtgatctggccacctatcggccggaagaagaagaagaaggttggcttcgatttctgaaagatttgagatttgagaatgcgttggttttcttcctaggcgctgctcttttagagttaaggtcgagttgatgtgctagtttgattcagcagtgggagtgagttgagacagaaggatgtggtgtgtgccagtattgttggtgcttttcgtgttctttggatgttacccttgaataatagtagcggccttggcgccgtttctgaaataatagtagcatccttgctcgttgccaagaaaatcttagtttttttttctcttgaacaagtggcaaagcgacctctgcatctatctctgtcattgacatttagctctgttgcggtgcactggataccttacattgctctagagaacagcaataaaagccggaccatgtgattgctgtaaaaaaaaaa

SEQ ID NO: 135 - DNA, 1986 bp, Festuca arundinacea
gaaacttctcatcccacaggccacagagcatccccacacatcctatctccctcctcgtgctccttctgtcgccatggcccaagcttgggccttcttcctcctcgccctcttctccttctcctcctatgtatccaggatcttcctctgcagcaggaatggcgagggatccttcctctgtgcacgggcaccagaggtcccctccattgctagcgacaggtaccggaccgcctaccacttccagccccacaagaactggatgaatgatccaaatggaccgatgtactacaatggcatctaccatttattcttccagcataaccccaatggcccccaatggggtgacatagtctggggccattcggtttcgaccgaccttgtcaactggatcatacttgaacccgcaatagaaccggatacaccaggtgacataaaaggttgctggtccggctcagccacagttatatctggtagtcaaccggtcatcatgtacaccggtggcgatgtagagaatcatcaggttcaaaacattgcgcttcctaagaaccggtctgacccgtaccttatagaatggaccaaggcatgcaataacccagtgctccaaccggttggaccaggaatgaacccaggcgagttcagggatccgacgacaggttggatcgggccggatggactatggagaatatcaattggagctgaggtgaacggttacagtgcagcacttttgtacaagagtgaagactttctgaattggagtagagttgatcacccactgtattcatccagtgcctccactatgtgggagtgcctggacttcttcgcggtattaccgggcagtaacggtggactggacctgtccgcagctattccgaaaggcgccaaacatgtcctcaaagtcagcgtggatcaatgtgacaagtacatgattggggtttatgatctcgaacatgatgcttttgtgcctgatactatcctcgatgaccgttggttgttgccgaggatcgattacggcaattactatgcttcaaaatcgttcttcgactcgaaaaataggaggaggatcatatggggttggactaatgagtcagatagttcttcagatgatgtcgcaaaaggctgggcaggtatctatgcaattcccaggacaatttggctagaccgtgatggcaagcagttgctgcaatggccagttgaagagattgagtcccttcgaagaaatgaaatcaactatcaaggactagatctggagaagggagatctttatgagattaagggagttgacactttgcaggctgatgtggagatagattttgagctgacgtctattgatgatgccgactcttttgatccttcctggcttttggatcccgaaaagcattgccgggaagcgggtgcatcagttcatggtggtatagggccatttggacttgttattctggccaccggcgacatggaggagcacactgttgtgcacttcagagtctacaaatcacagaaagaatacatgatactcatgtgctctgatataagaaggtcttccctgagacaaggactgtacgcacctgcctatggaggcttctttgaatttgatcttgaaaaggaaaggaagatatctctgagaactctaattgatcggtcggcggtggagagctttgggggcggtggcagggtctgtatcatagctagagtttatccagtggcgattgtcgatgacgggagtgcccacatgtatgccttcaacaatggaagtaccacggtcagggtgccacagatcagggcatggagcatgatgacagcacaagtgaatttaaagaaaggctgaagtgatgattaacacagaaaagctaattccttttattgattctttctcttattcatgagcactcattcgtacaaataaacggaaattcaacaggcatatgtaattgattgtttccttgatctcaattattcatatactataattattattaaaaaaaaaaaaaaaaa

SEQ ID NO: 136 - DNA, 2073 bp, Lolium perenne
gaaaactagattattgtccagtctccttgacttgcattaaactttgcgatctggacggctataactgcgccctgaaagccttctgcaatttacacatcgatcggccagcccatccatcagtacctttgtcccctcttggtcttcctctccgattccgattcgcaccaccatgaatggaatcgagcacccgggcaatggccggaccgcctaccacttccaaccggcgaagcattggcagaatgatcccaatgggccaatgtaccacaacggcctgtaccacttcttctaccagtacaatccccacggcccgacctgggacaccggcaagttatcatggggtcactccgtctccggcgacctcgtgaactgggccgccctcgacaatgctctcgaccccaccgccccgttcgacgccaacggctgctggtccggctccgccaccatcctccccggcggccgcccggccatcctctacaccggcatcgacgccgacaaggtgcaggtgcagaacgtggcattcgccaaggacccctccgacccgctcctccgcgagtgggagaagcccagctgcaacccggtgatcccgtaccccgccgacgtgacgggcaacaacttccgtgatccgacggaggcgtggcgcggccgcgacggcctgtggcgggtcggcatcgtcgccgaggtgaagggcgtggggtccctgctcgtgtaccggagcgcggacttcctccgctggcagcgcaacgccgcgccgctgcacgccagctcgcgggacgtgcccgtgctggagtgcccggacctgttcccggtggctgcggcggcgcagggcgcgacggaggggctcgagacttcggcaccgagcggcgccggggtgaggcatgtgctcaagctcacggacttcgccaaggaggaccactacatggttgggttttacgacgacgtggcggacaccttcgtgccggcggagcccgagcgcggcgacgaccccgacaactggcgccggctcgaccacggccacctgtacgcgtccaagtccttctacgacgcgcgcaacaagcggcgcatactgtgggcgtgggtggacgagaccgacggtggcggcgtcgccaggggctgggccggcatccaggcgttcccgagggcgatgtggctggacgccgacgggaagcggctggtgcagtggcccgtggaggagatcgagacgctgcggaggaagcgggtcggcctgcggtgggcgacggacgtggaggccggcggcaggaaggagatcgccggcatcgtgagctcgcaggcggacgtggaggtcgtgttcgagatcccgaacctggaggaggccgagacgttggaccccgagtgggtgctggatccgaaagggctgtgcgcggcgaagggcgcgtccgtgcacggcggcgtcggcccgttcgggctgctcgtcttggcctccggtgacctggaggagcacactgctgtgttcttcagggtgttcaagcacgatggcaagtacaaggttctcatgtgcaccgatctcacaaagtcatctacgaaagcaggggcacacaagccatcctatggagcatttcttgatgtggacgtggagaaggacaagttcatatcgctcagaacattgatcgatcacacggtggtggagagcttcggcgacggcgggaggacgtgcatgacggctcgtgtgtaccccgaacacgcggcgatgggaagcacccacctgtacgtgttcaacaacgggacaggtgccgtaaaggtgtccaaacttgaggcgtgggagctggcgacggcggccgtgaacggcggctcgcttgcacccgtcgtcgtcaaggcatccgaccctaaagaggccttgtagttctagggtatgcccgggatggtggctgcttagatgatgtccgtcgttgatttatgcttgttggtcgagttatgagtttcgggtaggatgatttatgcggaaatgcaattttagtggcgtcatgacctattggacaaacatctgtcattggaaaaacgtggtgatatgtccacgcccatatctaaaggtataatagaggcatcccaaaaaaaaaa

SEQ ID NO: 137 - DNA, 1888 bp, Festuca arundinacea
gaaaatctccttcagctcctgccctccatggcccatgcttgggccttctttctccttgccctcttctccttctcctcctgtgtgtccaagctcttcatctacagcaggaatggcgagggatccttcctctgtacacggtctccggaggtcccctccattgccagcaagaggtacaggactgcctaccacttccagtctcccaagaactggatcaatgatccatgtggacccatgtactacaatggcatttaccatgaattctaccagtataaccccggtggcaccatcgcggctaacatagtttggggccattcggtttcaaccgaccttgtcaactggatccagcttgaacctgcaatagtacgggataccccatatgacatacacggttgctggaccggctcaatcacaattctacctggtgatcagccggtcatcatatacaccggtcgtgactcggacaatcatcagagccaaaacattgagctccccaaaaaccgatctgacccatacctgagggaatggaccaaagcagacaataacccgaggatcctaccggttggaccagacttgaacttgacccagttcagggatccgacaaccggttggattggaccggatggactatggagaatagcaattggtgctgagctgaatggctacggtgccgcacttttgtacaagagtgaagactttctgaattggactagagttgatcacccactgtattcagacaatgccccctcaatgtgggagtgcccagatttcttcgccgtattgccaggcaataacggtggactggacctgtctgcggcgatcccgaaaggcgccaaacatgtcctcaagatgagcgtggattactctgacaagtacatgattggggtttatgatctcaaacgtgatgcctttgttccggatgttgtcctagatgaccgtcggctgtggttgaggattgattacggcacattctatgcttcaaaatccttcttcgactcgaaaaggggcaggagggtcatatggggttggtccaacgagacagatagtgtttcagatgatggtgcaaaaggttgggcaggtatccatgcaatccccaggtcaatttggttagacagcgatggcaaacagttgctgcaatggccgattgatgagattgagtcccttcgaagagatgaaatcaaccatcaaggactagagctgaagaacggagacctatttgagattaagggaattgacactttgcaggctgatattgaagtagattttgagctgacgtccatcgacagcgccgatccttttgatccttcctggcttttggatgtcgagaggcattgccgggaagcaggtgcatcggttcaaggtggcatagggccatttggacttgttgtcctggcgtctgacaacatggaggagcacattgctgtgcacttcagagtttacaaatcacagaaaagccacatgatcctcatgtgctctgatctaagaaggtcttctctgagatcaggactgtacacaccagcctatggaggcttctttgaatttgaccttgaaaaggaaaggaagatatctctcagaactctgattgatcggtcagcggtggagagctttggcggcggtggcagggtctgcataacggccaggatttatccagtggcgcttgtcgacggcagggtccacatgtatgccttcaacaatggaagtaccacggtcagggtgccacaactcggggcatggagcatgatgacagcacaagtgaacgtgaataagggttgaagtgatggttaacacagaagagcagtttcattttcttaattagcgtactctcattcaggagcactccttggtacaattgaaaggaaattcgacaggaagtagttggtcaaaaaaaaaa

SEQ ID NO: 138 - DNA, 1849 bp, Lolium perenne
aaagttcatccctccttctgtccccatggcccaaggttggcccttcttcctccttgtcctcttctcctcctgtgtatccaaccacctcgtcaatggagaaagggtcttcctcttcccccagtctcacaaggtctcctccattgtcagcaagaggtataggactgcctaccacttccagccccccaagaactggatcaatggaccaatgtactacaatggtatctaccatgagttctaccagtacaaccccaatggctccctctggggtaacataatttggggccattcagtttcgacggacctcatcaactggatcccagtagaacctgcgatagaacgggatatcccaagtgacataaacggttgctggaccggctcagccacaattatttccggtgatcaaccaattatcatatacaccggagccgacaaggagaaccgtcagctccagaacattgtgcttcccaaaaacaagtctgacccgtatctgagggagtggacaaaagcaggtaataacccggtgatccaaccagtcgggccaggcttgaatgcgagccagttcagggatccgacaaccggttggattggaccggatggactgtggaggatagcagttggtgctgagcttaatggctacggtgctgcacttttgtacaagagtcaagactttctgaattggactagagttgatcacccgctgtattcatccaatgcatcctcaatgtgggagtgcccagattttttcgcggtattgccgggaaatagtggtggacttgacctatctgcagaaatcccaaatggcgccaagcatgtcctcaaaatgagcctagattcctgtgacaagtacatgatcggagtttatgatctgaaaagtgatacctttatgccagatagtgtgttagatgaccgtcgactgtggtcgaggatcgatcatggcaatttctatgcttcaaagtcattcttcgactcgaaaaagggaaggaggatcatatggggttggacaaatgagacagatagctcttcagatgatgttgcaaaaggttgggctggaatccatgcaattcccaggacaatatggttagacagttatggcaagcagttgctgcaatggccaattgaagagatcgagtcccttcgaagaaatgaaatcagccatcaaggactagagctgaagaaaggagacctatttgagattaaaggaactgacacttcgcaggctgatgtggaggtagattttgagctgacatccattgataatgccgacccttttgatccttcctggcttctggatgtcgagaagcagtgccgagaagcaggtgcatcggttcaaggtggcatagggccatttggacttgttgtcttggcctctgacaacatggaggagcacactgctgtacacttcagagtttacaaatcgcagcaaagctacatgatcctcatgtgttctgatctaagaaggtcttccctgagatcaggaatgtacacaccagcatatggaggcttctttgaatttgaccttcagaaggaaagaaagatatctctgagaactctgattgatcggtcagcggtggagagcttcggaggcggtggcagggtctgcatcatggccagagtttatccggtggtgcttgtcgatgatggcggggcccacatgtacgccttcaacaatggcagtaccacggtcagggtgccacagctcagggcatggagcatgagcagggcagagcacaagtgaatgtaaagttaaagtgatgattaacatagaagagcaaatctaattgacctgtgattggaggactggaaaagtgatttaaatgcttagcacaattgtttcttgataaaaaaaaaa

SEQ ID NO: 139 - DNA, 2166 bp, Lolium perenne
gggaccttgcgcccaagtacgtagtctgacagcaatgggggttcgtctcgggagagtagcttgggcgtgcccggcggttctggtgctgctcttgcagctcgccggagcgtcccatgtcgtctacgagaccagcctcctcgagaccgaggcggcggcggccaccgtgccagcctccatttttgagctgagcaccgggtaccacttccggcctcagaagaactggatcaacgatcccaacgcgccgctgtactacaagggttggtaccatctgttcttccagtacaaccccaagggcgcggtgtggggcaacatcgtgtgggcgcactcggtgtcgcgcgacctcatcaactgggtggccctggagacggccctggcgccgagcatcgacgccgacaaatacggctgctggtcggggtcggcgaccatcatgcccgacggcacgccggtgatcatgtacacgggcgtcagccggccggacgtcaactacgaggtccagaacgtcgccttccccaagaacagctcggaccctctcctccgggagtgggtgaagccggcgcacaacccggtgatcgtcccggagggcggcatcaacgcgacgcagttccgggacccgaccacggcctggtacgcggacgggcactggcggatcctggtgggcgccctctccggcgcgtcccgcggcgtggcgtacgtgtaccggagccgcgacttccggcggtggacgcgggtgcggaagccgctgcactcggcgccgacggggatgtgggagtgcccggacttctacccggtgaccgtggacggcaaggagagcggggtggacacgtccgtggtgtccagctcgagggtgaagcacgtgctcaagaacagcctcgacctccgccgctacgactactacaccgtcgggacctacgaccggctgaaggagaggtacgtgccggacaaccccgccggcgacaagcaccacctgaggtacgactacggcaacttctacgcgtccaagacgttctacgacccgtccaagcgccgccgcatcctgtggggatgggcgaacgagtccgacaccgccgtcgacgacgtcgccaagggctgggccggaatccaggcgattcctcggaaggtttggctggacccaagcgggaggcagctgatgcagtggccggtggaggaggtggaggcgctcagggggaagaagccggtcagcctcaaggaccggatggtgaagcggggagaacacgtcgaggtcaccgggctacaaaccgcacaggctgacgtcgaggtgagcttcgaggtgccgagcctggagggggcggaggcgctggacccggcgctggccaacgacgcccagaagctttgcggcgtgaagggcgccgacgtggagggcggcgtggggcccttcggtctgtgggtgctggcgtcgtccaagctggaggagaggaccgccgtcttcttcagggtgttcaaggccgcgggcaacgtcaacagcaccaagcccctcgtgctcatgtgctccgatccaaccaagtcatctctgaacaagaacctgtaccacccgaccttcgcgggcttcgttgatattgacatggctaagggcaagatttctctcagaagcctgatcgatcaatccgtcgtggagagctttggggccggaggcaggacgtgcatcctctctcgcgtctacccgtcgctcgccattggcaggaacgctcacctccacgtcttcaacaacggcaaggcggacatcaaggtgtcgcggctcacggcgtgggaaatgaagaagccggcgctcatgaacggtgcctagatttagattcaggcaggagcaccatatgcatgattcctacatatgtgcttgaatttggctcaggcatgcgtctggggcgttattctgatgttaatttgacctctggtgaaacatgctagttttacaagggcgcgtacgtagctagctaggtttgcacgctgtgtaagtgaagggggtcattttgtatgcccccgggaataataaagatccatgcatagcctgaggtgggcatcggtagaaagttatttttctgaaacggggcaaaatatttgctccaatcaactactcctggcatggattaaaataaggagcaacaaagtagaagttttacaagaaagttaatgttttgattattaaaaaaaaaa

SEQ ID NO: 140 - DNA, 2137 bp, Lolium perenne
ccctcgcactagtcggccgaggcattcttcctagttgcttccatcgcatcgatctcgatccacagattctatgccaatggaggcaagagatggcgtctcgatgccctactcgtatgcggccctgccggaggacgccgaggcagcggtggttgggcgcggtcgccggaccgggcctctgttcgcagcgttgctgttgacgttggtcgccgcgctccttgccgtcgccgcgctggctggcgtcaggctcgttggcgagctgcctgccgggggcgtcgtcatgcccaaccacccgatggaagtcatggacgtcagcggtagcagagggcctgagtcaggcgtgtcggagaagacgtccggggccgccagcgagagcggcggcatgctgggcgccgacgccggcagcaacgcgttcccgtggagcaatgcgatgctccagtggcagcgcaccggcttccacttccagcccgagaagaactggatgaacgaccccaacggtccggtctactacaaggggtggtaccacctcttctaccagtacaacccggagggcgcaatctggggcaacaagatcgcgtggggccatgccgtgtcccgggacatgctccggtggcgccacctgcccatcgccatgttccccgaccagtggtacgacatcaacggcgcatggtcaggctccgccaccgtgctccccgacggccgcatcgtcatgctctacacgggctccaccaacgcctccgtgcaggtccagtgcctcgccttcccctccgacccctccgacccgctgctcaccaactggaccaagtatgagggcaacccggtgctgtacccgcctccgcacgtcggggagaaggacttccgggacccgaccactgcatggtacgatggctccgatggaatgtggcggatcgtcatcgggtccaaggataaccgccgcgccggcatggccttgacctacaagaccaagaacttccatgattttgagctcgttcccggagtgctgcaccgggtgccggcgacggggatgtgggagtgcatcgatttgtacccggttggcggcgcgaggggcattgacatgacggaggccgttgcggcggcatccaacagcggtggtggtgaagttttgcatgtcatgaaggagagctcagacgacgaccgacatgactactacgcgctagggaggtacgatgcagcgacaaacaagtggacaccgctagatgccgacgccgatgtcggcatcgggctgaggtacgattggggaaagttctacgcatccaagaccttctatgacccggccaagaagaggcgtgtgctatgggggtgggtcggcgagactgactctgagcgcgccgacgtggccaagggatgggcttccctacagtcgatccctcgcacggtggtgctagataccaagacgggcagcaaccttatccagtggccggtggtcgaggtggagacgctccgtaccaactccaccaatctcgggagcatcatcgtcgagcatggctccgtcttccctctcagtctccaccgggccacacagctcgacatcgaggcttccttccgcctggacccgctcgatgtcgccgccgcaaaggaggccgacgttggctacaactgcagcaccagcggtggcgcggccggtcgtggagcgctcggtccctttggcctgctcgtactcgccgatgccaggcgccatggcggggacacggagcagaccgccgtctacttctacgtcgcgaggggcctcgatggcaacctgcgcacgcacttctgccatgacgagtcacggtcatcccgtgccaacgacattgtcaagagggtcgttggcaacatcgtgccagtgctcgacggagaggcgctgtctgttagggttctggtggaccactccattgtcgagagcttcgcacagggtgggaggtcggtggtgacttcacgagtttacccgactgaggccatctacgccaatgccggggtatacctcttcaacaacgccaccggtgcccgggtcaccgccaccagtctcgtcgtccatgagatggacccctcctacaaccagaaccaggccgagatggcttcattgtaaatcgaaaatgtacatattgttttttgtgctagcatgttgcccgtaaaaaaaaaa

SEQ ID NO: 141 - DNA, 1954 bp, Lolium perenne
gaaagctttctttcctgtttgctcgctggtgcggccggcggcgtaccttctccggcgacgacatgcatgcagatcccaacggtccggtctattaccgcggatggtaccacctcttctaccagtacaaccccgagggggcggtctggggcaacatcgcgtggggccacgctgtctctcgggacctagtccactggcgccacctcccgctcgccatggtgcctgaccagtggtacgacatcaacggtgtctggacaggctccgccaccgtgttccccgatgggaccctgaacatgctctacacggggtccaccaatgcctccgtgcaggcccagtgcctcgccgtgcccgaggaccccaatgactccctcctccgcaactggaccaagcacgaagccaacccggtcctcctcccaccgcccgggatcggtgacaaggacttccgtgacccaaccaccgcatggttcgacgagtctgaccagacgtggcgcaccgtcatcgggtccaaggacaacaacggccacgccggcatcgccatggtgtacaagaccaaagacttcctcaactacgagctcatcccgggatacttgcatcgcgtcgacggcaccggcatgtgggagtgcatcgacttctaccccgtcggcggcaagaacggcagcgaggagctgtacgtgatcaaggagagcagcgacgacgaccgacatgactggtacacgctagggaaatacgacgcggcagccaacacgttcacggccgcggacccggagaacgacctagggattgggctgaggtacgactggggcaagttctacgcgtccaagaccttctacgacccagccaagaagcggcgcgtgctgtgggggtggattggcgagaccgactccgagcgcgccgatgtcgccaagggatgggcatccctcatgtcgattccgaggacggtggagctcgacgagaagacctggaccaacctcatccaatggccagtggaggagatcgagaccctccgcatcaagtccaccgaccttggtggcatcaccattgaccacggcagcgtctacccactccctctccaccgcgccacacagctagacatcgaggcctccttccgcctcgacgccgccaccgtcgccgccctcaacgaggctgacgtaggctacaattgcagcaccagcggcggctctacccaccgcggcgcactcggcccctttggcatcctcgtccttgccgacggtaaggcggagcaaacggcggtgtacttctatgtgtccaagggccttgacggggccctcgagacccacttctgccacgacgagtcgcgatcgacgctggccaaggatgtcgtgaagcgagtggtgggatacaccgtgcctgtcctcgatggtgaggcattttccgtgagggtgctcgtggaccactcaattgtggagagcttcgccatgggtggaaggtccacggcgacgtcgagggtgtacccgacggagtctatctacggcgctgctggtgcatatcttttcaacaatgccaccggcggctccgtgaccgttgagaagctcgtggtgcatgagatggactcgtcctacaaccagatcttcatggctgacgacttgtagtcaccgtcatccatggatagcgtcggatggtgaggatgatcacctactacatatacatacatactattgatcgaacgatcaccggatcggtcggtggtggcttcctctttctcttggatgcagaaggagatggagtactagctactctatttaccatgttgttgttttgttggttttttggggtttgggtttttgacgagatggatgaattagctatagatggatgattgtgtcctattttctctcctgccttccgagtgtaactacatatattggcaggatcgatgatatccctgttgcatgacagtgatgattaattattgtgatgatattgatcaaaaaaaaaa

SEQ ID NO: 142 - DNA, 2039 bp, Lolium perenne
aggaggtggtggaggagcacgaaatcccggccgccattcctccaccttccgctccgaccaaagatttccatccggcgagatccatgggctccatcgcggcagacttggcgccggaggcgcccgcggagctggtgttccggtcgaagctcccggacatcgagatcccgacccacctgacgctgcaagactactgcttcgagcgcctgccggagctctccgcccgcgcctgcctcatcgacggcgccacgggcgccgcgctcacctacggcgaggtggacgccctctcgcgccgctgcgcggccgggctgcgccgcctcggcgtccgcaagggcgacgtggtcatggcgctcctccgcaactgccccgagttcgccttcgtgttcctcggcgcggcccggctcggcgccgccaccaccaccgccaacccgttctacacgccccacgagatccaccgccaggccgccgcggccggcgccaaggtgatcgtcaccgaggcctgcgccgtcgagaaggtgcgcgccttcgccgccgagagagggatccccgtcgtctccgtcgacgaggccgtcgacgacggctgcctcccgttcgccgcgactctcctcggggaagaaagcggcgagcggttcgtcgacgaggcggtcgaccccgacgacgtggtggcgctgccgtactcgtccggcaccaccggcctgcccaagggcgtcatgctcacccaccgcagcctcgtcaccagcgtcgcccagcaggtggacggtgagaacccgaacctgcacttcagctcgtccgacgtgctgctgtgcgtgctgccgctgttccacatctactcgctcaactcggtgctgctcgccggtttacgcgccgggtgcgcgatcgtgatcatgcgcaagttcgaccacggcgctttggtggacctggtgcgcgcgcacggcgtcacggtggcgccattcgtgccgcccatcgtggtggagatcgccaagagcgcgcgggtgaccgccgcggacctggcgtcgatccggctggtcatgtcgggggcggcgcccatgggcaaggagctgcaggacgcgttcatggccaagatccccaacgctgtgctcgggcagggatatgggatgaccgaggccggccccgtgctagccatgtgcctggccttcgccaaggagccgttcgaggtcaagtctggctcctgcggcaccgtcgtccggaacgccgagctcaagatcgtcgaccccgacaccggcgcctccctcggccgcaacctgccgggggagatctgcatccgcggcaagcagatcatgaaaggttacctaaatgatccggaggccacaaagaacaccattgacaaggacggttggctgcatactggagacattggttatgtcgatgatgacgacgagatctttattgtcgacagactgaaggagataatcaaatataagggattccaagtacctccagcagaacttgaagcccttctcattacgcaccctgaaatcaaggatgctgctgtcgtatcgatgcaagacgaacttgctggtgaagttccggttgcgtttgttgtgcggactgaaggttcagagatcagcgaaaacgagatcaagcagttcgttgcaaaagaggttgttttctacaagaggatctgcaaagtgttcttcgcggattccattccaaagagtccatctggcaagatcctcaggaaggacctgagagcaaagctcgccgcaggcattcccggcagtgataccacacagtccaaaaactaagtcagatatattgtttcccaaccttacacacctctgtccaacaccatgtaatgttcttaatataaacggaaattattacatatagaagggctgattctttttactagatgtgtccaacatatgatatgtttgttaggccgatgatgtgtaacctgtcatgtatagataccgcctttttttgataagaaaggctgattataatgtataccatgagctgaatatttgttcaaggagatcaggattcggttgccaattgtttaccttttaaaaaaaaaa

SEQ ID NO: 143 - DNA, 2006 bp, Lolium perenne
gagagaggagatcaagcaagccatctcccacgactaatttagaagaagatttacttagtctctgcttctcgctcgatcgccggccggtgaggtagctagctagctactcgtactagatcattaccatgggttccgtgccggaggagtcagtggtgtccgtggccgcggcggagacggtgttccggtcgaagctccccgacatcgagatcaacaacgagcagacgctgcagagctactgcttcgagaagatggccgaggtcgcgtcccgcccctgcatcatcgacggccagacgggcgcctcctacacctacacggaggtcgactccctgacccgtcgcgccgcggcggggctgcgccgcatgggcgtggggaagggcgacgtggtgatgaacctgctccgcaactgccccgagttcgccttctccttcctgggcgcggccaggctgggcgccgccaccaccaccgccaacccgttctacaccccgcacgagatccaccgccaggcggaggcggcgggcgccaagctgatcgtcaccgaggcctgcgccgtggagaaggtgctggagttcgcggcggggcggggcctgcccgtggtcaccgtcgacgggaggcgcgacgggtgcgtggacttcgcggagctgatcgccggcgaggagctgcccgaggcggacgaggccgggatcctccccgacgacgtcgtcgccctgccctactcctccggcaccaccgggctccccaagggcgtcatgctcacccaccgcagcctcgtcaccagcgtcgcccagctggttgacgggtcgaacccaaacgtgtgcttcaacaaggacgacgcgctgctgtgcctgctgccgctgttccacatctactcgctgcacacggtgctgctggcggggctccgcgtcggcgccgccatcgtcatcatgcgcaagttcgacgtcggcgcgctggtggacctcgtccgcgcgcaccgcatcaccatcgcgccattcgtgccgcccatcgtcgtggagatcgccaagagcgaccgcgtcggcgccgacgacctcgcatccatccgcatggtgctctccggcgccgcgcccatgggcaaggacctccaggacgccttcatggccaagatccccaacgccgtgctcggacagggttacgggatgactgaggccgggccggtgctggccatgtgcctggcgttcgccaaggagcccttcaaggtcaagtccgggtcgtgcggcaccgtggtgcgcaacgcagagctcaaggtcgtcgaccccgacaccggcgcatccctcggcaggaaccagcccggcgagatctgcgtccgcgggaagcagatcatgataggttacctgaacgacccagagtctaccaagaacaccatcgacaaggacggctggctgcacaccggagatatcggcttggtggacgacgacgacgagatcttcatcgtcgacaggctcaaggagatcatcaagtacaagggcttccaggtggcgccggcggagctcgaggccctcctcctcacgaacccggaggtcaaggacgccgccgtcgtaggggtgaaggatgatctctgcggcgaagtcccggtcgccttcattaagaggatcgaaggatctgagatcaccgagaacgagatcaagcaattcgtctcaaaggaggttgttttctacaagaggatcaacaaggtctacttcaccgactccattcccaagaacccttccggcaagatcctaaggaaggacttgagagccaggctcgccgctggcatccccaccgaagttgccgcgccgagaagctaagggccgcttctcaggaacgcaatcacccatggtgctgtttaggtgctgttatagaccacaccaaatggggaaagaaactacgggaggggatcatattattcttgcaggagatatcagtttgttgattcgccctgcttgtgtaatgttgataaaatgaaatgatataatagatgtgttgttttattttttgaccatgtaaaaaaaaaa

SEQ ID NO: 144 - DNA, 1789 bp, Lolium perenne
ctcaacactcgccaatcccacagccacagaagccacctaccaccgctccaccgatcgacgatggaggtcctcctcctggagaaggccctactggggctcttcgcggcggcggtgctggccatcgccgtcgcgaagctcgccggcaagcgcttccgcctcccgcccggcccctccggcgcccccatcgtcggcaactggctccaggtcggcgacgacctgaaccaccgcaacctgatgggcatcgcgaagcggttcggggaggtgttcctgctccgcatgggcatccgcaacctggtggtggtgtccagcccggagctggccaaggaggtgctccacacgcagggcgtggagttcggctcccgcacccgcaacgtcgtcttcgacatcttcaccggcaacggccaggacatggtcttcaccgtctacggcgaccactggcgcaagatgcgccggatcatgaccgtccccttcttcaccaacaaggtggtggcgcagaaccgggtgggctgggaggaggaggccaggctcgtggtggaggacgtcaaggccgacccggcgtccgcgaccgccggcaccgtgatccgccgtaggctgcagctcatgatgtacaacgacatgttccgcatcatgttcgaccgcaggttcgagtccgtcgacgacccgctcttcaacaagctcaaggccatgaacgccgagcgcagcatcctgtcgcagagcttcgactacaactacggcgacttcatccccattctccgaccgttcctccgcaagtacctcaaccggtgcacaaacctcaagaccaagaggatgaagctcttcgaggaccacttcgtcgctgacagaaagaaggcgctggagcagaatggggagatcaggtgcgccatggaccacatcctggaggcggagaggaagggcgagatcaaccacgacaacgtcctctacatcgtcgagaacatcaacgttgcagccatcgagacaacgctgtggtcgatcgagtggggcatcgcggagctggtgaaccacccggacgtccagtcgaagctccgcgacgagatgaccgccgtgctgggcgccgacgtggcggtgacggagccggacctggagcgcctcccctacctgcagtccgtcgtgaaggagaccctccgcctccgcatggccatcccgctgctcgtgccgcacatgaatctcagcgacgccaagctcgccggctacgacatccccgccgagtccaagatcctcgtcaacgcatggttcctcgccaacgaccccaagcggtgggtgcgcgccgacgagttcaggcccgagcgcttcctcgaggaggagaaggccgtcgaggcccacggcaacgacttccgcttcgtgcccttcggcgtcggccgccggagctgccccgggatcgtcctcgcgctgcccatcatcggcatcacgctcggacgcctcgtgcagaacttccagctgctgccgccgcccgggcaggacaagatcgataccaccgagaagcccggacagttcagcaaccagatcctcaagcacgccaccgtcgtctgcaagccgctcgaggcctagaattttctatttgatcgtatggaggcttctgacatgcgtgtctgtgcatgcatgcgtgaacgctggtgccgggagatcgatctatgcacgcatgtgatgtgtattttcctttttttgtgcttttattttacttagttgcatttttgttggtcttcatgtgaggcgtcatgttgtagatttactatgttggtgataatgatgtaaaacttcttcaaaaaaaaaa

SEQ ID NO: 145 - DNA, 1358 bp, Lolium perenne
cctcaccagcacctctctcgcccacgcctccgatctcctctcgccgccgcgctcggtgccaagagaatgggcagcgtcgacgcctccgagaagacgatcaccggctgggccgccagggacgccaccggccacctctccccgtacacgtacaacctcaggaggacgggcgctgaagatgtggtgctgaaggttctgtactgcggcatctgccacactgacctccaccagaccaagaaccaccttggtgcttcaaaataccccatggttcccgggcatgaggtggtaggcgaggtggtggaggtcgggccggaggtgagcaagtacagcgtcggcgatgtggtcggcgtgggggtgatcgttgggtgctgccgcgactgccggccgtgcaaggccaacgttgagcagtactgcaacaagaagatctggtcgtacaacgacgtctacaccgacggaaagcccacgcagggcggcttcgcctcctccatggtcgtcgaccagaagttcgtggtgaagatcccagcggggctagcgccggagcaggcggcgccgctgctgtgcgctggcgtcacggtgtacagcccgctgaagcacttcgggctgatgaccccgggcctccgcggcggcatcctcggcctgggcggcgtgggccacatgggcgtgaaggtggccaagtccatgggccaccacgtcaccgtgatcagctcctccgacaagaagcgcgccgaggccatggacgacctgggcgccgacgcctacctcgtcagctccgacgaggcccagatggccgccgccatggactcgctggactacatcatcgacaccgtgcccgtcaagcacccgctcgagccctacctcgcgctgctcaagatggacggcaagctcgtcctcatgggcgtcattggcgagccgctcagcttcgtgtcccccatggtcatgctcgggaggaagaccatcacgggcagcttcatcgggagcatcgaggagaccgaggaggtgctcaggttctgcgtcgacaagggcctcacctcgcagatcgaggtcgtcaagatggactacctcaaccaggcgcttgagaggctcgagcgcaacgacgtcaggtaccgcttcgtcgtcgacgtcgcagggagcaacatcgacgacactgccgcatgatcaacttggcaacgacgagcgaacctacattgagcgcgacaatttccgtgacatatactcctcaacttggttcaatacatgattgtgaactgtgtgaatgtgtttccgtcttctatcagagattcagagtgtgcatgttagtttcaataggaagaaatgtttggtatgagtccggcctaataataacggatttgctaaaaaaaaaa

SEQ ID NO: 146 - DNA, 1051 bp, Lolium perenne
caatcatccagcccagatctcacgcgtttccttcctccagctaaagaccggcaatggcgaccacggcggctgatgccacggccacggttgccaaggagcagaccaccaccaacggcgccgccagcggtgccgagcaggtcacccgccactccgaggtcgggcacaagagcctgctccagagcgacgcgctctaccagtacatcctggagaccaccgtgtacccgcgcgagcacgagtgcatgaagcagctccgcgaggacaccgccaaccacccatggaacctgatgaccacgtcggcggacgagggccagttcctcaacctgctcatcaagctcatcggcgccaagaagaccatggagatcggcgtctacaccggctactccctcctcgccaccgcgctcgccatccccgaggacggcacgatcttggccatggacatcaaccgcgagaactacgagaccatcggcaagccgtgcatcgagaaggccggcgtcgcgcacaagatcgacttccgcgaggggcccgcgctcccggtgctcgacgagctgctcgaggacgaggccaaccacggcaccttcgacttcgtcttcgtcgacgccgacaaggacaactacctcaactaccaccagcgcctcatgaagctcgtcagggtcggcggcctcctcggctacgacaacacgctctggaacggatccgtcgtgctccccgccgacgcgcccatgcgcaagtacatccgctactaccgcgacttcgtcctcgagcttaacaaggccctcgccgcagacgaccgcgtcgagatctgccagctccccgtcggcgacggcatcaccctctgccgccgcgccaagtgattgtctgattgatgacgcgagcgcgccgccccctcggctccgctccgctccatggatgcggacaagaattgattaattattattccccattttgccgttctggctttcttctgtatcttcttggaaacaaatattgtccctttatgtacgtatatcaaatttatatccagacaaataatattactcctataaaaaaaaaa

SEQ ID NO: 147 - DNA, 1332 bp, Lolium perenne
gacgaatcctaccaaaccgagctaccagatccttctctactaatcgagctccctccgcctgtcctcgtccccgcctcaccgccggccggttctccgctccgagctatacgtccgtccgagaacacccgtcccatattaactatcaacatgacagtcgtcgaggtcttagctgccggcgacgccgccgccgccgcggtggcgcggcccgccgggaacgggcagaccgtgtgtgtgaccggcgccgccgggtacatcgcgtcctggctcgtcaagctgctgctggagaaggggtacactgtcaagggcaccgtcaggaacccagacgacccgaagaacgcgcacctgagggcgctcgacggcgccgccgaccggctggtcctctgcaaggccgacctcctcgactacgacgccatccgccgcgccatcgacggctgccacggcgtcttccacaccgcatccccagtcactgacgaccccgagcaaatggtggagccggcggtgaggggcacgcagtacgtcatagacgcggcggcggaggccggcacggtgcggcggatggtgctcacctcctccatcggcgccgtcaccatggaccccaaccgcgggccggacgtggtcgtcgacgagtcgtgctggagcgacctcgacttctgcaagaaaaccaggaactggtactgctacgggaaggcggttgcggagcaggcggcatcggagttggcgcggcagcgcggcgtggaccttgtggtggtgaacccggtgctggtgatcggccccctgctgcagccgacggtgaacgcaagcatcggccacatcctcaagtacctggacgggtcggccagcaagttcgccaacgccgtgcaggcgtacgtggacgtccgcgacgtggccgacgcccacctccgcgtcttcgagtgcgccgccgcgtccggccgccacctctgcgccgagcgcgtcctccaccgcgaggacgtcgtgcgcatcctcgccaagctcttccccgagtaccccgtccccacaaggtgctccgacgaggcgaacccgaggaagcagccatacaagatgtctaaccagaagctccaggacctcggactcgagttcaggccggtgagccagtccctgtacgagacggtgaagagcctccaggagaagggccaccttccggtgctcagcgagcaggcagaggcggacaaggaaaccctggctgcagagctgcaggcaggggttaccatccgagcatgaggaacaagaaatcaaccatgtccatactgctactgtcatgtaaaccaggcagtgtctgttgaatgcctaatctaagttcttgtaaaaaaaaaa

SEQ ID NO: 148 - DNA, 1236 bp, Festuca arundinacea
caagagctagttcttctgtccatccgtagctcttccctttcaccaacaagctagtttagacaagtacagtggtactgtaagagcaacaatgaccgttgtcgacgccgccgcgccgcagctgcctggccatgggcagaccgtgtgcgtcaccggcgccgcggggtacatcgcgtcggggctcgtcaagctgctcctggagagaggctacaccgtgaagggcacagtgaggaacccagatgatcccaagaacgcccacctgaaggcgctggacggcgccaccgagaggctgatcctctgcaaagccgacctcctcgactacgacgccatatgcgccgccgtcgagggctgccacggcgtgttccacaccgcctctccagtcaccgatgatcctgagcagatggtggagccggcggtgcggggcacggagtacgtgatcaacgcggcagcggatgcgggaacggtgcgccgggtggtgttcacgtcgtcaatcggtgccatcaccatggaccccaaccgcggtcctgacgtagtcgtcaatgagtcctgctggagcgacctcgaattctgcaagaaaaccaagaactggtactgctacggcaaggccgtggcggagcaggctgcgtgggaggcggccaggaagcgcggcatcgacctcgtcgtcgtgaaccctgtgctcgtggtagggccgctgctgcaaccaacggtgaacgctagcgccgcacacatcctcaagtacctcgacggctcggccaagaagtacgccaacgctgtgcagtcatacgtagacgtgcgtgacgtagccggcgcgcacatccgggtgttcgaggcgcctgaggcgtcgggccggtacctctgcgccgagcgcgtgctgcaccgtggggacgttgtccaaatcctcagcaaactcttccctgagtaccctgtgccaacaaggtgctctgatgaagtgaacccacggaagcagccttataagatgtccaaccagaagctgcaggatcttggcctccagttcactcctgtgaacgactctctgtatgagaccgtgaagagcctccaggagaagggacatctcctagtaccaagcaaaccagagggattaaacggtgtaacggcatgatactgctaaagaagcagcagagttcacgtgctcctgtaacatggtcaaacatgagttgtttttctgtataaattctatccagtatcgtgttatttaagtgaactaagagaaaaaaaaaa

SEQ ID NO: 149 - DNA, 1428 bp, Festuca arundinacea
ctctcgatcggcagacgcagagatcgatgggttccaccgccgccgacatggccgcgtccgccgacgaggaggcgtgcatgttcgccctccagctcgcctcctcgtcgatcctcccgatgacgctgaagaacgccatcgagcttggcctcctggagatcctggtggccgccggcggcaagtcgctgacccccaccgaggtggccgccaagctcccgtccgcggcgaacccggaagcgccggacatggtggaccgcatgctccggctgctcgcgtcgtacaacgtcgtgacgtgcctggtagaggagggcaaggacgggcgcctctcccggagctacggcgccgcgcccgtgtgcaagttcctcacccccaacgaggacggcgtctccatggcggcgctcgcgctcatgaaccaggacaaggtcctcatggagagctggtactacctcaaggacgcggtccttgacggcggcatccccttcaacaaggcgtacggcatgtcggcgttcgagtaccacggcacggacccgcgcttcaaccgcgttttcaacgaagggatgaagaaccactccatcatcatcaccaagaagctcctcgagctctaccacggcttccagggcctcggcaccctcgtcgacgtcggcggcggcgtcggcgccaccgtggccgccatcgccgcccactaccccgccatcaagggggtcaacttcgacctcccccacgtcatctccgaggcgccgcagttcccgggcgtcacccacgtcggcggcgacatgttcaaggaggtgccctcgggcgacgccatcctcatgaagtggatcctccacgactggagcgaccagcactgcgccacgctgctcaagaactgctacgacgcgctgccggcgcacggcaaggtcgtgctcgtcgagtgcatcctgccggtcaacccggaggccaagcccagctcgcagggggtcttccacgtcgacatgatcatgctcgcgcacaaccccggcggcagggagaggtacgagagggagttcgaggccctggccaggggagctgggttcaccggcgtcaagtccacgtacatctacgcaaacgcgtgggccatcgagttcaccaagtagatgagatccctccggcctccatgcatccaggcaacctcccaccgatatgagaacgatcgtcgtcgatcttgctggctgctgcctctgctcctgcatcgatctgcatacgtaccctttgcttggtttttcctctgttttccctaattttctcatgctctgaattctgaattctgatggctgtgtcgtcgatctgctcggaaatgttctgaaaaggttgcgtatgttgtatacttgtatgtgatgtaatgagatgatttctctcctttgttgaatactcgagtaaattgaagtgactctcatcttcctctgaaaaaaaaaa

SEQ ID NO: 150 - DNA, 1455 bp, Lolium perenne
ctctcgctcacaccaaaatcgcccaccagcaccagcatctctcgatcggcagacgcatagatcgatgggctccaccgccgccgacatggccgcgtccgccgacgaggacgcgtgcatgttcgccctccagctcgcttcctcgtcggtcctcccgatgacgctgaagaacgccatcgagcttggcctcctggagatcctggtggccgccggcggcaagtcgctgaccccgaccgaggtggccgccaagctcccgtccgcggcgaacccggaagcgccggacatggtggaccgcatactccggctgctcgcgtcgtacaacgtcgtgacgtgcctggtggaggagggcaaggacggccgcctctcccggagctacggcgccgcgcccgtgtgcaagttcctcacccccaacgaggacggcgtctccatggcggcgctcgcgctcatgaaccaggacaaggtcctcatggagagctggtactacctcaaggacgcggtccttgacggcggcatcccgttcaacaaggcctacggcatgtcggcgttcgagtaccacggcacggacccgcgcttcaaccgcgtcttcaacgaagggatgaagaaccactccatcatcatcaccaagaagctcctcgagctctaccacggcttcgagggtctcggcagcctcgtcgacgtcggcggcggcgtcggcgccaccgtggccgccatagccgcccactaccccaccatcaagggggtcaacttcgacctcccccacgtcatctccgaggcgccgcagttcccgggcgtcacccacgtcggtggcgacatgttcaaggaggtgccctcgggagacgccatcctcatgaagtggatcctccacgactggagcgaccagcactgcgccacgctgctcaagaactgctacgacgcgctgccggcgcacggcaaggtcgtgctcgtcgagtgcatcctgccggtcaacccggaggccaatcccagctcgcagggggtcttccacgtcgacatgatcatgctcgcgcacaaccccggcggcagggagaggtacgagagggagttccaggctctcgccaggggagccggattcaccggcgtcaagtccacgtacatctacgccaacgcgtgggccatcgagttcaccaagtagatgagatccctccaagcatccaggcaacatgtcccaccgatatgagaacgatcgtcgtcgatcttgctggctgctgccgctgctcctgcatcgatcaccctttgcttggtttttcctctgttttccctaattttctcatgctctaaatccattctgaattttaatggttgtgtcgccgatctgctcggaatgtaccattaataacgatgttctgaaaaggttgcgtatgttgtatacttgtatgtgatgtaatgagatgatttctctcctttgttgaatatacgagtaaattgaagtgaaaaaaaaaa

SEQ ID NO: 151 - DNA, 2101 bp, Lolium perenne
catcaacctaaaacccacgcgatccaacaccccctagagaaaaacaaaaacaaaaagattacagtttctggtttgagtatcaatcgatggtgggcttcgctaagatcgccatggagtggatccaagatccactgagctggctgttcatcgcctccgtggttttcgtggttctgcagcggcggcggcggggcaacgtggcgccgtttcccccgggcccgaaaccgctgccgatcgtcggcaacatgtcgatgatggaccagctcacccaccgtggcctggcggcgctagcgaaggagtacggcggccttctccacatccggctcggtaagctccacacctttgccgtgtcgacgccagagtatgcccgggaggtgctgcaggtgcaggacggtgccttctcgaaccgtcccgcgaccatcgccatcgcgtacctcacctacgaccgagccgacatggcgttcgcgcactacgggcccttctggcgccagatgcgcaagctgtgcgtgatgaagctcttcagccggcgccgcccggagacgtggctcgccgtgcgcgacgagtccgcggctctcgtccgcgccgtggccaggcggaccggcgagtccgtggacctcggcgagctcatttttaaactcaccaagaatgtcatcttccgcgccgcgttcggagctggtgcggtcgccgccgacgccgaggagggcgacggagcagggaagcaggacgagttcatcgccatcctccaggagttctccaagctcttcggcgccttcaacatcggagacttcatcccgtggctgagctgggcggacccgcagggcatcaacgtgcgcctccgcgccgcgcgcaacgccctcgacgagttcatcgacaagatcatcgacgagcacatggagaggggcaagaatcccgatgatgccgatgccgacatggtggacgacatgctcgcgttcctcccggaggcgaagccgaagaagggcgccgccggcgacggcgtggacgacctgcagaacacgctccgcctcacccgcgacaacatcaaggccattatcatggacgtgatgtttggcgggacggagacggtggcgtcggcgatcgagtgggcgatggcggagatgatgcacagccccgacgacctccgccgcctgcagcaggagctcgtcgacgtggtggggctcgaccggaacgtggacgagtcggacctcgacaagctccccttcctcaagtgcgtcatcaaggagacgctccggctgcacccgcccatcccgctgctcctccacgagaccgccgaggactgcgtcgtcggcggctactccgtgccccggggctcccgcgtcatgatcaacgtctacgccatcggccgcgaccgcagggcgtggaaggacgccgacgtgttccggccgtcgcggttcgtgcagggggaaggggaggccgccgggctcgacttcaaggggggatgcttcgagttcctgcccttcgggtcaggccgccgctcctgccctggcatggcgctcggcctgtacgcgctggagctcgccgtggcgcagctcgcgcacggtttcagctgggagctgcccgacgggatgaagccgtcggagctggacatgagcgacgtcttcggcctcaccgccccgcgcgccaccaggctcttcgccgtgcccacgccccgcctcgcatgcacccagctgctgggagctgacgacgccgggcgccaggcgtgacggccattgctgtgttagcaagcgatcgatggtatatgtaccagctggccggaagatgaaggtgtttgatatattcagaggtgatggcggaggcgccattggtggagcttggtggttttatcttgctttttttttactatttttcttatactttgaactcaattaagtctggtgacaacagaacacaataagcggattatcatgcttgctggatgcatgcttggatacagtgttaagcatgatgtgttctaccatgaagaacgcaaattgtaaaaacaagtttttagacctgctgcaccgagattctgtattttcttcctcttggttttccatcgtgagtactatattaatgccaggatgatagttccagttgaaaaaaaaaa

SEQ ID NO: 152 - DNA, 2460 bp, Lolium perenne
gttctttgcaacgatcaacactgtcagaatccagatacacacacacacacacacacaccaagcagcgtctagctagcttacttgctctagtagttctttgcaaatatccatggagtccgagaacgttgccgccaacggcgatggcctgtgcgtggcacagccggctcgcgccgaccctctgaactggggaaaagcagccgaggagctgtctgggagccatcttgatgccgtgaagcgaatggtggaggagtaccgccgccctgtggtgaccatggaaggcgccagcctgactatcgccatggtcgctgcggtggctgccggcgccgacaccagggtggagctcgacgagtccgcccgcggacgcgtcaaggagagcagcgactgggtcatgaacagcatggccaacggcaccgacagctacggtgtcaccaccggcttcggtgccacctcccaccggaggaccaaggagggtggcgctctccagagagagctcatcaggtttctcaatgcgggagcattcggcaccggcagcgatggccacgtcctgcccgctgcgacgacgagggctgccatgcttgtccgtgtcaacaccctgctccagggctactctggtatccgctttgagatcctcgagacggtcgccacgcttctcaacgccaacgtgacaccgtgcctaccgctccggggcacgatcacggcatccggtgacctcgttccgctgtcctacatcgcgggccttgtgaccggccgcccaaattctgtggcgactgctccggatggcacgaaggttaacgctgcagaggcattcaaaatcgcgggcatccagcacggtttctttgagctgcagcctaaggaaggccttgccatggtcaacggcaccgcggtgggctccggactggcgtccatggtgctcttcgaggctaacatccttggcatcctcgctgaggttctgtcggctgtgttctgtgaggtcatgaacggcaagccagagtacaccgaccacctcacgcacaagttgaagcaccaccctggtcagattgaggccgcggctatcatggagcacatccttgaaggaagctcctacatgatgctcgcgaagaagctcggcgagctcgacccactgatgaagccgaagcaagataggtatgcccttcgaacatcaccgcaatggctgggccctcagattgaggttatccgtgccgccaccaagtccatcgagcgcgagatcaactccgtcaacgacaacccgctcatcgacgtctctcgaggcaaggccatccatggtggcaacttccagggcacacccatcggtgtgtccatggataacaccaggcttgccattgctgcgatcggcaagctcatgtttgcccagttctctgagctagtgaacgacttctacaacaatggtttgccttccaatctctcgggtgggcgcaacccgagcttggactatggcttcaagggtgctgagattgccatggcctcctattgctccgagctccaattcttgggcaaccctgtgactaaccatgtgcagagtgcggagcagcacaaccaagacgtcaactctcttggtctcatctctgctaggaagacctctgaggccatcgatattctgaagctcatgtcatcgacattcttggttgcactgtgccaagctatcgacctccgccacctcgaggagaatgtcaagaatgccgtcaagaactgtgtgaagatggtggctaggaagaccctgagcaccaatgacagtggccatctccacagcgcacgcttctgcgagaaggacctgctcttgacgatcgaccgcgaggcggtgttcgcctacgcagacgacccttgcagcgctaactacccactgatgcagaagatgcgtgcagttctcgtggagcacgccttggccaacggtgaggctgagcgggatgtgcagacgtcagtgttcgccaagcttgccgcattcgagcaggagctccgtgcagtgcttccaagggaggtcgagtcagcccggtgtgctgtggagaatggcaccgccgcgcagcaaaaccgcatcaccgaatgccggtcgtacccgctgtaccgcttcgtgcgcaaggagctcggaaccgagtacttgaccggagagaagacgaggtctcctggtgaagaggtggacaaggtgtttgtggctatgaaccaggggaaacacatcgacgcactgcttgagtgcctcaaggagtggaacggtgagcccctgcctatctgctgaagaatgaatcaaggaactgaagaatagagtacttgagagttcagaaggctccacatgtgcttagttaatagtaagtatagtactgttttttcattgtatcttgtgcattatatatacatgtaacactggaataaaatttcaaaaaatcagatcactcaatgggcagcatgtaacactggaataaaaatttcaaaaaaatcagatcaaaaaaaaaa

SEQ ID NO: 153 - DNA, 2595 bp, Festuca arundinacea
ctcctctgtaattcgagctcctcttcagcacaagtacttccaccagagtgccagacaacaatccagcaccacttccagaatacatacacacacgtacccgtgtctaaaccttacttgctttcctagttctttgcatatctccatggagtgcgagaacgggcacgttgccgccaacggcgatggcctctgcgtggcgcagccagcccgggccgaccctctcaactgggggaaggcagcagaggagctgtccgggagccatttggatgccgtgaagcggatggtcgaagagtaccgcagaccagtcgtgaccatggagggcgccagcttgaccattgctatggtcgccgcggtggccgccggcgccgacacccgggtggagctcgacgagtccgcccgcggacgcgtcaaggagagcagcgactgggtcatgaacagcatggcgaacggtaccgacagctatggtgtcaccaccggcttcggcgccacctcacaccggaggaccaaggagggtggcgctctgcagagagagctcatcaggttccttaacgcgggagcatttggcaccggcagcgatggccatgttttgcccgctgcaacaaccagggcggccatgctcgtccgtgtcaacactctgctccaggggtactctggcatccgcttcgaaattctcgagacgatcgccacgcttctcaatgccaacgtgacgccgtgcctaccgctccggggcacaatcacggcatccggcgacctcgtcccattatcctacatcgccggccttgtgactggccgcccaaactctgtggcgacagctccagatggcagcaaggttaacgcagcagaggctttcaagattgccggcatccagcatggcttctttgagctgcagcccaaggaaggccttgccatggtcaacggcactgccgtgggctccgggctcgcgtccatagtgcttttcgaagctaacatccttggcatccttgccgaggttctatcggccgtgttctgcgaggtgatgaatggcaagccggagtacaccgaccacctaacacacaagctgaagcaccacccgggccagatcgaggccgcggccatcatggagcacatccttgaaggcagctcctacatgatgctcgcgaagaagctcggtgagctcgacccactgatgaagccaaaacaagataggtatgcactccgcacatcaccacaatggctcggccctcagatcgaggtcatccgtgctgctaccaagtccatcgagcgtgagatcaactccgtcaacgacaacccactcatcgacgtctcccgcggcaaggctatccacggtggcaacttccagggcacgcccatcggtgtgtccatggacaacaccaggcttgccattgcggccatcggcaagctcatgtttgcccagttctcggagcttgtgaacgatttctacaacaacggtttgccttccaatctctctggtgggcgcaatccgagcttggactatggcttcaagggtgctgagattgctatggcctcatactgctccgagctccagttcttgggcaaccctgtgactaaccatgtgcagagcgccgagcagcacaatcaagacgtcaactctctcggcctcatctcttccaggaagaccgctgaggcgattgacattttgaagctcatgtcctcgacattcatggttgccttgtgccaagctatcgacctccgccacatcgaggagaatgtcaagaatgccgtcaagaactgtgtgaagacggtggctaggaagaccctgagcaccaatgacagtgggcatctccacaatgcacgcttctgcgagaaggacctgctcctgacgatcgaccgtgaggcggtgttcgcctacgcagatgacccttgcagcgccaactacccgctgatgcagaagatgcgtgcggttctcgtggagcatgccttggccaacggtgaagccgagcaggacgtgcagacgtcagtgttcgccaagcttgccacattcgagcaagagctccgtgcggttcttcccaaggaggtcgagtctgcccggtgttccgtggagaacggcaccgccgcacagcagaaccgcatcagcgaatgccggtcatacccgctctatcgcttcgtgcgcaaggagctcgggactgagtatttgaccggagagaagacgaggtctcctggtgaagaggtggacaaggtgtttgttgctatgaaccagggtaagcacattgacgcgctgcttgagtgcctcaaggagtggaacggtgagcccctgcctatctgctgaagaatggctcaaggaactcaagaatagagtgcttgagaattcagatggtactgttttataattatatctccggatatcgatgtttgcaatgttcctccagagctgcaatgccagttagaaaagataatagcatgacttggtagtgttgtttagcctagaaattttctatgatgttagttagtaaaagggtacactttgtgataaatatacataattattgcactagtcctttatttttatatcaatgttctgtctactgaggcaactttgaaggattcaaagaatctagtattggcctgccaaaaaaaaaa

SEQ ID NO: 154 - DNA, 1382 bp, Lolium perenne
ggccacaactcgccacatctggcatagcgagcactgacagtgagctacatccatcaccatggcttctagccgtgtcctgctcctcgtcgtggcagctctggcgatctccgtgtccgccacggccgcggccaccaagatcagtgctccactaccgccgctggccaagggcctgaacttcgatttctacaaggccacctgcccgcaggccgagtccatcgtcttcaacttcctccgcgacgccatccgcaaggacgtcggcctcgccgccgcgctcctccgcatccacttccacgactgcttcgtgcagggctgcgacggctccgtgctcctcgacaagaccggcggcaccgacagcgagaagatcgcaccacccaacgtcacgctccgccccaccgccttcaaggccatcaacgacctccgcgctctcctcgccaaggcctgcggcgccgtcgtctcctgcgccgacatcgccgccctggccgcgcgcgactccgtgcacctcgccggcgggccgcactaccccgtcccgctcggccgccgcgacgggctcgcccccgcgaacctcaccaccatcctcaacgccctcccggcaccgagctccaacgtcaccaccctcctcagattcctcgccaagatcagcctcgacgccaacgacctcgtcgcgctatccggcgcgcacacgctcggcatcgcgcactgcacctccttccaggagcgcctcttcccgcagaacgacgtcaccctcaacaagtggttcgcgtcgcagctcaggctcacctgcccggcgctcaacaccgacaacaccaccaacaacgacatccgcacccccaacgtcttcgacaacaagtactacgtcgacctgctcaaccgccagggactcttcacctccgaccaggacctgcacaccgacgccaggaccaagcccaccgtcaccaggttcgccgtcgaccaggccgcctttttcgaccagttcgtcttctccgtcgtcaagatgggccagatcaacgtgctcaccggcagccagggacagatacgcaacgactgctccgcgcccaacaaaggccgcaccaacgacgacctgccgtggtccgtgctcgagaccgtcaccgaggccgcccagagcttggtgttgtagatatgcgctgtggataggttggttcagtcgatccatctctagcctacgtactttcttcccaaagttgtagctttattagcgagccgtgtggtaatggtttgggctttgagagccacagttgatgcatgtgtgtttagtttcttgagcaactcgaccagtttaataatcacgagatggtttttggtgtgtcgaatgacgactagaaaattgagatgaatatttgatgttattttcaataaaaaaaaaa

SEQ ID NO: 155 - DNA, 1260 bp, Lolium perenne
atcgcctttctcctccatgaccaccatgggcggctcgtcgatcctgcccgcgccgaccgtggcgacgacggcgctggttctgctgatcgtgctgttcgcatcgccggcaacggtggcgaaaggttctgggctgtccgtcgggttctacaagaagttgtgtccgaaggcggagaaggtcgtccggcgaactgtcaccaaggcctttgagaaggagcctggcaccccggccgacatcatccgcctcttctttcacgactgctttgtccgagggtgcgacgcatcggtgctgctggaatccacgccagggcgcatggcggagagggactcgaaggcaaacaaccccagcttggatgggtttgaggtcattagcgacgccaaggagacccttgagaagctctgcccgcaaaccgtctcctgtgctgacattctcgccctcgccgcccgcgatggcgcctacctcgctagcgggctcgactatgcggtgcccaccggccgccgtgatggcctcgtctccaaggaagacgaggttctccctagtgtccctcaccccgacttcaaccattctcagctcgtggaaaacttcacggcaaaaggctttacggcggaggagatggtgacgctgtcgggggcgcacaccatcggcacctcgcactgctcgtccttcacggaccgcctctacaacttctcccagggcggcgcgctgaccacggaccctgcgctgccggcggcatacgccgcgctgctgaaggagaagtgcccgccggagacagcggcgcagaacgacaccaccatggtgcagctcgacgacgtgacgccgttcgtgatggacaaccagtactacaagaacctgcttgccggcaccgtgccgctcggctccgacgtagcgctcatggagagccccgacacggcggcgctcgtcgagctctacgcccgcgagcccgccgagtactgggccaagcgcttcgttgcggcgatggtcaaggtgagcgagatggaggtgctcaccggggccgagggggagatccggctcaactgctccaaggtgaactagtatataaccggttgctgcgtttgtctctgtactatatgtttgggaaagatgacgatacacgttcttcttttgtgttaatgttttttctttcatttgttttcatatggtggtgagaaatatatacacatttgtttgcgtcataaactgtatagcttacacagcatgcataaaagcatctatatcattccatttgagttgtaaaaaaaaaa

SEQ ID NO: 156 - DNA, 1204 bp, Lolium perenne
atccccaaacccaaaaggtgaggcctccagatacttggatctccaatggctcctgctactcccaaggacagctctgctctgcctggtttgctcttgctcttcgcagcagcgacgtccgtggcggtagcgaacgcacagctatcagagaactactacgggtcttcttgtcccaccgcgcttctcaccatcaggactgtcgtgacgacggcggtgctgctggaccaccgcatgggcgcttctcttctccggctccacttccacgactgctttgtgcaagggtgcgacgcgtccgttctgctggatgacacggccggcttcaccggcgagaagggggccgggccgaacgccgggtcgctgcgcggtctggaggtgatcgacaagatcaagatgctgctggagttcatgtgcccgcggaccgtctcctgcgccgacatcctcgccgtcgccgcccgcgactccgtcgtccgtctaggggggccatcatgggcggttcaacttggaaggagggacgccaccacagcaagcgcgtcacttgctagtagtgacctcccaggccccaactccaacctcaatgatctcctcaccgctttctccaaaaaaggactaagcaccacggacatggttgctctatcaggggcccataccatcggccgggcgcagtgccagaactaccggaaccggatctacaccgacaccgacattgacggggcattcgcagcgtccctgcgaggcggctgcccacaggccggcggcgacggcaacctcgcgccgctcgacgcgtcctctcccaacaccttcgataacggctacttctccggcctcctctcccgccaggggctgctccattccgaccaggcgctgtacgacggcggctccacggacgatctggtcaggacctacgcctccaataacgatcagtttggcagcgacttcgctgcggcgatggtgaaactgagcaatatcggcctgctgacggggtcgtccggggagatcagggtcaactgccgggcggtgaattaacgatggatggatgggggcatcatgaaacgaacaaggcgtgcgatttccggaactgcaggcaacgaaactgcatatttatgtacactgcctatttatttcctgtccttgtgtccccgtcttgttatattacatccataatccatgttaagatggtggcattggtttaaaaaaaaaaaaaaaaaaa

SEQ ID NO: 157 - DNA, 1530 bp, Lolium perenne
actcattcatctgtcgtctcctgcttccctcaagcttagatcgattgcagccggccggggactgttgagctaccactgccggtcgctggtacgagcggacgtaaggagagatccagatggccgcgacgatgaccgtggaggaggtgaggaaggcacagcgggcggaggggccggcgacggtgctggccatcggcacggcgacgcccgctaactgtgtctaccaggctgactacccggactactacttcaagatcaccaagagcgaccacctcgccgatctcaaggagaagttcaagaggatgtgcgacaagtctcagatcaggaagaggtacatgcacctgacggaggagatcctggaggagaaccccaacatgtgcgcgtacatggcgccgtcgctggacgcgcgccaggacatagttgtcgtcgaggtcccgaagctcgggaaggcggcggcacagaaggcgatcaaggagtggggccagccgcggtccaagatcacccacctcgtcttctgcactacctctggtgtggacatgccaggcgccgactaccagctcaccaagatgctcggcctgcgcccgtcggtgaagcgcctcatgatgtaccagcagggctgcttcgccggcggcacggtgctccgcctcgccaaggacctggctgaaaacaaccgcggcgcgcgcgtgctggtggtctgctcggagatcacggccgtgaccttccgcggcccgcacgagtcacacctcgactcgctggtcggccaggcgctcttcggggacggcgctgccgcggtgataatcggcgccgaccccgacgtgtccgtcgagcgcccgctgttccagctggtgtcggcgagccagaccatcctgccggactcggagggcgccatcgacggccacctcagggaggtcggcctcaccttccacctcctcaaggacgtgcccgggctcatctccaagaacatcgagcgcgccctggaggaagccttcaagccgctcggcatcgacgactggaactccgtcttttgggtggcgcacccgggcgggccggcgatcctcgacatggtggaggcaaaggtaaacctcaacaaggagcggatgcgtgccaccaggcacgtcctctccgagtacggcaacatgtccagcgcatgcgtcctcttcatcatggacgagatgcgcaagcgctctgccgaggatggtcacaccaccaccggcgagggaatggattggggcgtcctctttggcttcgggcccggcctcaccgtcgagaccgttgtcctccacagcatgcccattgccgctgatgccaccgcttgatcgatggttccatctccgtttatctgccacatcgatggatacctactactactaccgccgccgccgctgctatccaaagtaatttgtattgtattcatgcatacctggtttgtatttgttggtaggattcgttccgctattatgtcgcttgtgtcgcgtacactgttgtatcctagtaatagtaatcaaacggagtacggtttatgtaaaaaaaaaa

SEQ ID NO: 158 - DNA, 1418 bp, Festuca arundinacea
gaaaagacagcacagaaatctatattctacaaggcagaaaagagcagcaggggaaatctagctaaggtcttgagaggaagatgaagcaggaggtgaagagcgagatgaacggcgagacgatgagcggcaacaaagggccggtggtggtgaccggggcgtcgggtttcgtcgggtcatggctcgtcatgaagctccttcaggcggggtacaccgtccgggccaccgtgcgcgaccctgggaacgtcgagaagacgaagccattgctggagcttcccggagccaaggagcggctgtccatctggcgtgccgacctgagcgaggaaggcagcttcgacgaggccatcgcgggctgcaccggcgtcttccacgtcgccacgcccatggacttcgagtccaaggaccctgagaacgaagtgatcaagccgacggtggaagggatgctgagcatcatgagagcgtgcaaggaggccggcaccgtcaagcgcgtcgtcttcacctcctccgccggcaccgtcaacattgaggagcggccgaggccggcctacgaccaggacaactggagcgacatcgacttctgccgccgcgtcaagatgacaggacagatgtacttcgtgtccaagtccctggcggagaaggccgccatggactacgccaaggagaacggcgtggacttcatcagcatcatccccacgctcgtcgtcggccccttcctcagcgccggcatgccgcccagcctggtcaccgccctggcactcatcacggggaacgaggcccactactcgatcctgaagcaggtgcagctggtccacctggacgacctctgcgactccatgacctacctcttcgagcacccggacgccaacggccgctacatctgctcctcccacgacaccaccattcatggcatcgccaggatgctcaaggagaggttccccgagtacgacatcccacagaaattcccgggagtcgacgacgacctccagccgatccacttcttcttcaagaagctgctcgaccacgggttcaggttcaggtacaccgccgaggacatgttcgacgccgcggtctggacgtgcagggagaagggcctgattccgctcggagcggaaggggcaggcggcccggccagtgcagccggcaagctgggagctgttctcgtgggcgaaggtcaggcgattggtgctgagacataagcgctagtgcatgtacactaggctggctacctcagacacatggtggagcgatgattatgttcgttaattctactatcctatatttcggttcagaaattgcattaagagaaccctgtaattggtgggatattatgaacggattatggaacgcaaataacttcatgacaaaaaaaaaaaaaaaaaaaaaaaaaaaaaaaaaaaaaaaaaaaaaaaaaaaaaaaaaaa

SEQ ID NO: 159 - DNA, 1209 bp, Lolium perenne
gagcaccacacatggcgactgaagccaagggggagacggtgctggtcaccggcgccagcggcttcatcggctcctggctcgtccgcctcctcctcgcccgcggctactccgtccacgccgccgtcctcaaccccgatgacaaggccgagacggaccacctcctcgcgctcgccgctgcggccggcgacgagggccgcatccgcttcttcaggtgcgacctcctcgacggcgccgccatgctcgccgccgtgcggggatgctccggcgtgttccacctcgcctctccctgcaccgtcgacctcgtcctcgacccccagaaggagcttgtggtgccggcggtggagggcacgctcaacgtgctgcgcgccgccaaggaagctgggggagtgcggcgggtggtggtgacctcctccgtctccgccctcgtcccctgcccggggtggccggccggcgaggtcctcgacgagcgctgctggaccgacatcgactactgcgacaagaacggggtttggtaccctgcttcaaaggcactggcggagaaggcggcatggaagtttgcagaggagaatggactggatgtggtgacggtcaatccagggacggttttgggcgagatgattccgccaaggctcaatgccagcatggccatgtttcttcgcttacttgaaggttgcaaagaggagtatgcagatttcttcatcgggccagtgcacgtggaagacgttgcattagcccatattctgctgtacgagaatccgtcagcatccgggaggcacctctgcgtggagcccatctgtcactggagtgttttcgcggcgaaagtcgccgagctctaccctgattacaaagttccaaaattccctgaggacacacagcctgggctggtgagggcggaggcggtgccaaagaagctgatggcgttgggtttgcagttcactcctcttgagaagatcatcagggatgccgtggagagcctcaagagcagaggatgcatcgcctgatgattggatcgttaggcatgtcacccttccgtcgtaggttcatgatcatccttgttgagagatgtgttgtgttgtgtccagcccagtgcctacccagaccatatacttaccagtatgatttgtgcaataacagccggttgatgtacggcatcacctgccctacacttgggatgcggatgctgtcacactgactccctcaaaaaaaaaa

SEQ ID NO: 160 - DNA, 1260 bp, Lolium perenne
gaaaagcttcacacagcttgagaaaatggtgagctcaaccaagggcaaagtgtgtgtaactggggcttcaggctttgttgcctcttggctcatcaagaaactccttgagtctggatatcatgtgatagggactgtcagagacccagggaatcgaagaaaggtgggacacctttggaaactaccaggtgcaaatgagaggctccaacttgtgagagctgatctattggaggaagggagctttgacgatgctgtaagggcttgtgagggtgtcttccacattgcgtcgcctgtccttgggaaatctgattccaattgcaaggaagcaacactcggtcctgcaatcaatggtaccctcaacgtgctaagatcctgcaagaagagtccatttctcaaaagggttgttctcacatcttcatcatccgcggtaaggattagggatgaaactcagcagccagaactgttatgggatgaaacgacatggagctctgtgccactctgtgaaaagctacagctatggtatgccctggcaaaggtatttgcagagaaagcagcattggactttgccaaggagaataacattgaccttgtgacagttcttccatcattcgtaattggacccagtttatcccatgaattgtgcactactgcttcagatatccttggcttacttcaaggtgacacagacaggttcactttgtacggaaggatgggatatgttcacatcgatgatgttgcccggagccacattctagtgtacgaaacaccggaggcaactggcagatatctgtgcagctcagtggttctggataacaatgaattggttggcttactggcaaaacagtttccagtattccccattccaaggaggctcaagaacccctatggaaagcaggcataccagctagacacatccaagctccaggggctgggtctcaagttcaaaggagtgcaggagatgtttaacgactgcgtcgaatcgctgaaagatcagggccatttgctggagtgcccgttgtgataacagagacagcattgacaagccatagccaaacagcattgacaagccatagccaaacacatctcaactatgcctgaatcatgtcagttctcgagtcatagattttttttttctcttcaaataattcccatgtactctccttactataccgaacatcaattgtcagcggcagattaaatgtgtccatatgctttgcaattgtttcaattagtaatgaaatatttgaaacaaaaaaaaaaaaa

SEQ ID NO: 161 - DNA, 1438 bp, Lolium perenne
aaacgactccaacgcaccgatcgacgacacaccctgcacttcacgggtcgatcggatcggaggatggcgccggtggtggagagagcgcccttcctgccgacgggggaggccacgctgcggccgtccttcgtgcgggacgaggacgagcggcccaaggtggcgcacgaccgcttcagcgacgaggtgcccgtcatctcgctccacggcatcgacgacgcgcggaggaccgagatccgggaccgcgtggcggcggcgtgcgaggggtggggcatcttccaggtcgtcgaccacggcgtcgacgccgcgctcatcgccgagatggccaggctctcgcgcgacttcttcgcgctccccgccgaggacaagctccgctacgacatgtccggcggcaagaagggcggattcatcgtctccagccacctccagggcgagacggtccaggactggcgggagatcgtgacctacttctcgtacccggtcaaggcgcgggactacggccggtggccggacaagcccgcggggtggcgcgcggtggtggagcagtacagcgagcggctcatggcgctgtcctgcaagctgctgggggtgctgtcggaggccatgggcctggagacggaggccctgtccaaggcgtgcgtggacatggaccagaaggtggtggtcaacttctaccccaagtgcccccagcccgacctcaccctcggcctcaagcgccacaccgaccccggcaccatcaccctcctcctccaggacctcgtcggcggactccaggccacccgcgacggcggcaacacctggatcaccgtacagcccatcgccggcgcattcgtcgtcaacctcggcgaccacggccactacttgagcaacgggaggtttaagaacgcggaccaccaggcggtggtgaacggggagagcagcaggctgtccatcgccacgttccagaacccggcgcccgacgccaaggtgtggccgctggcggtgagggagggggaggacaccatcctggaggagcccatcaccttcaccgagatgtaccgccgcaagatggcgcgcgacctcgagctcgccaagcgcaagaagcaggccaaggccgatcagctcaagcagcagctgcagcaggaggccgcgcccgccgccgcgcccaccaagccactcaaccagattcttgcctagattccatgccgattcattcatgcgtgatatatagtactatgtactatatcgtattaaaataagtaattatctctatctactcatttgtgtgtaattaagagatgagtaattatctagtatatacacatttgtctgcgaggagcgagctggacctgtaataacatgtagcatgtcctacgtggaaccgatcagctgattggagctgtcacatgagtttgctgtgtgcagaaattgaacgcattcggtactgctttcaaaaaaaaaa

SEQ ID NO: 162 - DNA, 1214 bp, Lolium perenne
gaaaatccccaaacccaaaaggtgaggcctccagatacttggatctccaatggctcctgctactcccaaggacagctctagctctgctctgcctggtttgctcttgctcctcgcagcagcgacgtccgtggcggtagcgaacgcacagctatcagagaactactacgggtcttcttgtcccaccgcgcttctcaccatcaggactgtcgtgacgacggcggtgctgctggaccaccgcatgggcgcttctcttctccggctccacttccacgactgctttgtgcaagggtgcgacgcgtccgttctgctggatgacacggccggcttcaccggcgagaagggggccgggccgaacgccgggtcgctgcgcggtctggaggtgatcgacaagatcaagatgctgctggagttcatgtgcccgcggaccgtctcctgcgccgacatcctcgccgtcgccgcccgcgactccgtcgtccgtctaggggggccatcatgggcggttcaacttggaaggagggacgccaccacagcaagcgcgtcacttgctagtagtgacctcccaggccccaactccaacctcaatgatctcctcaccgctttctccaaaaaaggactaagcaccacggacatggttgctctatcaggggcccataccatcggccgggcgcagtgccagaactaccggaaccggatctacaccgacaccgacattgacggggcattcgcagcgtccctgcgaggcggctgcccacaggccggcggcgacggcaacctcgcgccgctcgacgcgtcctctcccaacaccttcgataacggctacttctccggcctcctctcccgccaggggctgctccattccgaccaggcgctgtacgacggcggctccacggacgatctggtcaggacctacgcctccaataacgatcagtttggcagcgacttcgctgcggcgatggtgaaactgagcaatatcggcctgctgacggggtcgtccggggagatcagggtcaactgccgggcggtgaattaacgatggatggatgggggcatcatgaaacgaacaaggcgtgcgatttccggaactgcaggcaacgaaactgcatatttatgtacactgcctatttatttcctgtccttgtgtccccgtcttgttatattacatccataatccatgttaagatggtggcattggtttaaaaaaaaaaaaaaaaaaa

SEQ ID NO: 163 - protein, 654 aa, Lolium perenne
MESSAVVPGTTAPLLPYAYAPLPSSSDDARENRSSGGVRWRACAAVLAASALAVVVVVGLLAGGRVDRVPAGADVASATVPAVPMEFPRSRGKDLGVSEKSSGAYSADGGFPWSNAMLQWQRTGFHFQPEQHYMNDPNGPVYYGGWYHLFYQHNPKGDSWGNIAWAHAVSKDMVNWRHLPLAMVPDQWYDSNGVLTGSITVLPDGQVILLYTGNTDTLAQVQCLATPADPSDPLLREWIKHPANPILFPPPGIGLKDFRDPLTAWFDHSDHTWRTVIGSKDDDGHAGIILSYKTKDFVNYELMPGNMHRGPDGTGMYECIDLYPVGGNSSEMLGGDDSPDVLFVLKESSDDERHDYYALGRFDAVANVWTPIDRDLDLGIGLRYDWGKYYASKSFYDQKKNRRIVWAYIGETDSEQADITKGWANLMTIPRTVELDRKTRTNLIQWPVEEVDTLRRNSTDLGRITVNAGSVIRLPLHQGAQLDIEASFQLNSSDVDAINEADVGYNCSTSGAAVRGALGPFGLLVLANGRTEQTAVYFYVSKGVDGGLQTHFCHDESRSTRAKDVVNRMIGSIVPVLDGETFSVRVLVDHSIVQSFAMGGRITATSRAYPTEAIYAAAGVYLFNNATGATVTAERLVVHEMASADNHIFTNDDL

SEQ ID NO: 164 - protein, 620 aa, Festuca arundinacea
MESRAFPNAAYAPLLPPTADDATLGKQDRPGVGWRGFLTVLAASGVVVLLVAATMLAGSRMGQAGDTDEDGAGGFPWSNEMLQWQRAGFHYQPEGHFMSDPDGPVYYRGYYHLFFQYNRRGVAWDDYIEWGHVVSQDLVHWRPLPLALRPDHWYDKKGVLSGTITVLHNGTLVLLYTGVTEDPMAESQCIAVPTDPNDPLLRHWTKHPANPVLAHPQGVQGMDFRDPTSAWFDKSDATWRILIGSKDDDNGSHAGIAFIFKTKDFLSFERVPGIVHRVEGTGMWECIDFYPVGGGHNSSSEELYVIKASMDDERHDYYSLGRYDAAANTWTPLDAELDLGIGLRYDWGKLYAATSFYDPLKQRRIMLGYVGETDSARADVAKGWASLQSIPRTVTLDEKTRTNLLLWPVEEVEALRYNSTDLSGITVDNGSVFHLPLHQATQLDIEASFRLDASDVAAINEADVGYNCSSSGGAAARGAIGPFGLLVHAAGDLRGEQTAVYFYVSRALDGTLRTSFCNDETRSSRARDVTKRVVGSTVPVLHGEALSMRVLVDHSIVQSFAMGGRVTATSRVYPTEAIYARAGVYLFNNATGASVTAERLIVHEMASAVYDETLIMVEDS

SEQ ID NO: 165 - protein, 623 aa, Festuca arundinacea; identical to SEQ ID NO: 66

SEQ ID NO: 166 - protein, 619 aa, Festuca arundinacea
MESRDFPSAAYAPLLPSAADDVALAKQDRPGVGWRGFLTVLAACGVVVLLVAASLLAGSRMGQAGDTDEDGAGGFPWSNEMLQWQRAGFHYQPEGHFMSDPDGPVYYRGYYHLFFQYNRRGVAWDDYIEWGHVVSQDLVHWRPLPLAMRPDHWYDKKGVLSGTITVLHNGTLVLLYTGVTEDPMAESQCIAVPTDPNDPLLRHWTKHPANPVLAHPQGVQGMDFRDPTSAWWDKSDSTWRILIGSKDDDNGSHAGIAFIFKTKDFLSFERVPGIVHRVEGTGMWECIDFYPVGGGHNSSSEELYVIKASMDDERHDYYSLGRYDAAANTWTPLDAELDLGIGLRYDWGKLYASTSFYDPLKQRRIMLGYVGEVDSARADVAKGWASLQSIPRTVALDEKTRTNLLLWPVEEVEALRYNSTDLSGITVENGSIFHLPLHQATQLDIEASFRLDASDVAAINEADVGYNCSSSGGAAARGALGPFGLLVHAAGDLRGEQTAVYFYVSRALDGSLRTSFCNDETRSSRARDVTKRVVGSTVPVLDGEVLAMRVLVDHSIVQSFAMGGRVTATSRVYPTEAIYARAGVYLFNNATGASVTAERLIVHEMASAVYDETVMVKDS

SEQ ID NO: 167 - protein, 1075 aa, Lolium perenne
MAGNDWINSYLEAILDAGGTAGDISAASVAGGDDGPGAGGGTAGEKRDKSSLMLRERGRFNPARYFVEEVISGFDETDLYKTWVRTSAMRSPQERNTRLENMSWRIWNLARKKKQIEGEEASRLSKKRLEREKARRDAAADLSEDLSEGEKGENINGSSVHDESTRGRMPRIGSTDAIEVWANQHKDKKLYIVLISIHGLIRGENMELGRDSDTGGQVKYVVELARALGETPGVYRVDLLTRQISAPDVDWSYGEPTEMLSPRNSENLGDDMGESSGAYIVRIPFGPREKYIPKEQLWPHIQEFVDGALVHIMQMSKVLGEQVGRERRVWPVVIHGHYADAGDSAALLSGALNVPMVFTGHSLGRDKLEQLLKQGRQTRDEVNATYKIMRRIEAEELCLDASEIVITSTRQEIEKQWGLYNGFDVTMERKLRARTKRGVSCYGRYMPRMIAIPPGMEFSHIVPHDVDLDGDEANEVGSGSPDPPIWADIMRFFSNPRKPMILALARPDPKKNITTLVKAFGEHPGLRNLANLTLIMGNRDVIDEMSSTNGAVLTSVLKLIDKYDLYGQVAYPKHHKQSEVPDIYRLAARTKGVFINCAYIEPFGLTLIEAAAYGLPMVATQNGGPVDIHRVLDNGILVDPHNQNDIAEALYKLVSDKHLWAQCRQNGLDNIHRFSWPEHCKNYLSRVGTVKPRHPRWQRSDDATEVSESDSPGDSLRDVHDISLNLKLSLDSEKAGTKINTERNSTNARRNLEDAVLKFSNAVSEGTKDESDENAEATTGSNKWPSLRRRKHIVVIAVDSVQNADLVQIIKNLFEASRKEKSSGAVGFVLSTSRAISETLTFLTSGGIQTTEFDAFICSSGSDLCYPSSSSEDMLSPTELPFMIDLDYHSQIEYRWGGEGLRKTLIRWAAENNSQSGQEVVTEDEECSSTYCISFKVKNTEAVPPVKDLRKTMRIQALRCHVLYSHDGSKLNLIPLLASRSQALRYLYIRWGVELANMTVVVGESGDTDYEGLLGGVHKTIILKGSFNAAPNQLHAARSYSLEDVISFDKPGIASVEGYLPDSLKSALQQFGVLN

SEQ ID NO: 168 - protein, 938 aa, Lolium perenne
MAAGNEWINGYLEAILDAGSKLRPQGVQLPPLETAPALAAEESSAAYNPTRYFVEEVVRSFDEQALHKTWTKVVAMRNSQERSNRLENLCWRIWNVSRQKKQVEWDYTKEVARRKLEQELGSREAAEDLSELSEGEKDTTTAKPDAAAAQPSADDGEHQQPQPRTRLARINSEVRLVSDDEEEQTKKRNLYIVLISIHGLVRGENMELGRDSDTGGQVKYVVELARALAATAGVHRVDLLTRQISCPDVDWTYGEPVEMLERLSSADADDDDGEQAGGGAYIVRLPCGPRDQYIPKEELWPHIPEFVDRALSHVTEVARALGEQLQPPPSPADGAVAAPIWPYVIHGHYADAAEVAANLASALNVPMVMTGHSLGRNKLEQLLKLGRMPGPEIQGTYKIARRIEAEETGLDTAEMVVTSTKQEIEEQWGLYDGFDLMVERKLRVRQRRGVSSLGRYMPRMAVIPPGMDFSFVETQDTADGDGADLQMLIAPDKAKKALPPIWSDVLRFFTNPHKPMILALSRPDPKKNVTTLLKAYGESRQLRELANLTLILGNRDDIEDMAGGGGAVLTAVLKLIDRYDLYGQVAYPKHHKQTDVPHIYRLAAKTKGVFINPALVEPFGLTIIEAAAYGLPVVATKNGGPVDILKALHNGLLVDPHSAEAITGALLSLLAEKSRWVECRRNGLRNIHRFSWPHHCRLYLSHVSTYCDQPSPHQPLRVPLALGSSTSFGADDSLSDSLRGLSLQISVDASSDLNAADSAAAIMDALRRRPASEKPASSGARALGFAPGRRESLLVVAVDCYGDDGKPDVEQLKKAIDAAVSVGECAGAKQGYVLSTGMTIPEAAEAIKACGADVASFDALICSSGAELCYPWKELVADEEYSGHVAFRWPGDHVKSAVPRLGSMEEIALAIDRPASSVHCHAYAATDASKVSITEHYL

SEQ ID NO: 169 - protein, 808 aa, Lolium perenne
MAAKLTRLHSLRERLGATFSSHPNELIALFSKYVHQGKGMLQRHQLLTEFEALFEADKERYAPFEDILRAAQEAIVLPPWVALAIRPRPGVWDYIRVNVSELAVEELTVSEYLAFKEQLVDEHASSKFVLELDFEPFNASFPRPSMSKSIGNGVQFLNRHLSSKLFQDKESLYPLLNFLKAHNHKGTTMMLNDRIQSLRGLQSALRKAEEYLTSIPEDTPSSEFNHRFQELGLEKGWGDTAKRVQDTIHLLLDLLEAPDPASLEKFLGTIPMMFNVVILSPHGYFAQSNVLGYPDTGGQVVYILDQVRALENEMLLRIKQQGLDITPKILIVTRLLPDAVGTTCGQRLEKVIGTEHTDILRVPFRTEKGILRKWISRFDVWPYLETYTEDVANELMREMQTKPDLIIGNYSDGNLVATLLAHKLGVTQCTIAHALEKTKYPNSDIYLDKFDSQYHFSCQFTADLIAMNHTDFIITSTFQEIAGSKDSVGQYESHIAFTLPDLYRVVHGIDVFDPKFNIVSPGADMTVYFPYTETDKRLTAFHPEIEELLYSDVENSEHKFVLKDKNKPIIFSMARLDRVKNMTGLVEMFGKNAHLKDLANLVIVAGDHGKESKDREEQAEFKRMYSLIEEYKLEGHIRWISAQMNRVRNAELYRYICDTKGAFVQPAFYEAFGLTVVEAMTCGLPTIATCHGGPAEIIVNGVSGLHIDPYHSDKAADILVNFFEKSTADPTYWDKMSEGGLKRIYEKYTWKLYSERLMTLTGVYGFWKYVSNLERRETRRYLEMFYALKYRSLAAAVPLAVDGENTDN

SEQ ID NO: 170 - protein, 815 aa, Lolium perenne
MGEAAGDRVLSRLHSVRERIGDSLSAHPNELVAVFTRLVNLGKGMLQPHQIIAEYNTAIPEAEREKLKDGAFEDVLRAAQEAIVISPWVALAIRPRPGVWEYVRVNVSELAVEELSVPEYLQFKEQLVEGSNKDFVLELDFEPFNASFPRPSLSKSIGNGVQFLNRHLSSKLFHDKESMYPLLNFLRAHNYKGMPMMMNDRVRSLSALQGALRKAEEHLSGLPADTPYSDFHHRFQELGLEKGWGDCAKRAQETLHLLLDLLEAPDPSTLEKFLGTIPMVFNVVILSPHGYFAQANVLGYPDTGGQVVYILDQVRAMENEMLLRIKQQGLDITPRILIVTRLLPDATGTTCGQRLEKVLGTEHTHILRVPFRTENGIVRKWISRFEVWPYLETFTDDVAHEISGELQANPDLIIGNYSDGNLVACLLAHKMGVTHCTIAHALEKTKYPNSDLYWKKFEDHYHFSCQFTTDLIAMNHADFIITSTFQEIAGNKDTVGQYESHMAFTMPGMYRVVHGIDVFDPKFNIVSPGADMSIYFPYSESQRRLTSLHPEIEELLYSDVDNDEHKFVLKDRNKPIIFSMARLDRVKNLTGLVELYGRNPRLQELVNLVVVCGDHGNPSKDKEEQAEFKKMFDLIEQYNLNGHIRWISAQMNRVRNAELYRYICDTKGAFVQPAFYEAFGLTVIEAMTCGLPTFATAYGGPAEIIVNGVSGYHIDPYQGDKASALLVEFFEKCQGDHSHWTKISLGGLQRIEEKYTWKLYSERLMTLTGVYGFWKYVSNLERRETRRYLEMLYALKYRTMASTVPLAVEGEPSSK

SEQ ID NO: 171 - protein, 581 aa, Festuca arundinacea
MAQAWAFFLLALFSFSSYVSRIFLCSRNGEGSFLCARAPEVPSIASDRYRTAYHFQPHKNWMNDPNGPMYYNGIYHLFFQHNPNGPQWGDIVWGHSVSTDLVNWIILEPAIEPDTPGDIKGCWSGSATVISGSQPVIMYTGGDVENHQVQNIALPKNRSDPYLIEWTKACNNPVLQPVGPGMNPGEFRDPTTGWIGPDGLWRISIGAEVNGYSAALLYKSEDFLNWSRVDHPLYSSSASTMWECLDFFAVLPGSNGGLDLSAAIPKGAKHVLKVSVDQCDKYMIGVYDLEHDAFVPDTILDDRWLLPRIDYGNYYASKSFFDSKNRRRIIWGWTNESDSSSDDVAKGWAGIYAIPRTIWLDRDGKQLLQWPVEEIESLRRNEINYQGLDLEKGDLYEIKGVDTLQADVEIDFELTSIDDADSFDPSWLLDPEKHCREAGASVHGGIGPFGLVILATGDMEEHTVVHFRVYKSQKEYMILMCSDIRRSSLRQGLYAPAYGGFFEFDLEKERKISLRTLIDRSAVESFGGGGRVCIIARVYPVAIVDDGSAHMYAFNNGSTTVRVPQIRAWSMMTAQVNLKKG

SEQ ID NO: 172 - protein, 562 aa, Lolium perenne
MNGIEHPGNGRTAYHFQPAKHWQNDPNGPMYHNGLYHFFYQYNPHGPTWDTGKLSWGHSVSGDLVNWAALDNALDPTAPFDANGCWSGSATILPGGRPAILYTGIDADKVQVQNVAFAKDPSDPLLREWEKPSCNPVIPYPADVTGNNFRDPTEAWRGRDGLWRVGIVAEVKGVGSLLVYRSADFLRWQRNAAPLHASSRDVPVLECPDLFPVAAAAQGATEGLETSAPSGAGVRHVLKLTDFAKEDHYMVGFYDDVADTFVPAEPERGDDPDNWRRLDHGHLYASKSFYDARNKRRILWAWVDETDGGGVARGWAGIQAFPRAMWLDADGKRLVQWPVEEIETLRRKRVGLRWATDVEAGGRKEIAGIVSSQADVEVVFEIPNLEEAETLDPEWVLDPKGLCAAKGASVHGGVGPFGLLVLASGDLEEHTAVFFRVFKHDGKYKVLMCTDLTKSSTKAGAHKPSYGAFLDVDVEKDKFISLRTLIDHTVVESFGDGGRTCMTARVYPEHAAMGSTHLYVFNNGTGAVKVSKLEAWELATAAVNGGSLAPVVVKASDPKEAL

SEQ ID NO: 173 - protein, 580 aa, Festuca arundinacea
MAHAWAFFLLALFSFSSCVSKLFIYSRNGEGSFLCTRSPEVPSIASKRYRTAYHFQSPKNWINDPCGPMYYNGIYHEFYQYNPGGTIAANIVWGHSVSTDLVNWIQLEPAIVRDTPYDIHGCWTGSITILPGDQPVIIYTGRDSDNHQSQNIELPKNRSDPYLREWTKADNNPRILPVGPDLNLTQFRDPTTGWIGPDGLWRIAIGAELNGYGAALLYKSEDFLNWTRVDHPLYSDNAPSMWECPDFFAVLPGNNGGLDLSAAIPKGAKHVLKMSVDYSDKYMIGVYDLKRDAFVPDVVLDDRRLWLRIDYGTFYASKSFFDSKRGRRVIWGWSNETDSVSDDGAKGWAGIHAIPRSIWLDSDGKQLLQWPIDEIESLRRDEINHQGLELKNGDLFEIKGIDTLQADIEVDFELTSIDSADPFDPSWLLDVERHCREAGASVQGGIGPFGLVVLASDNMEEHIAVHFRVYKSQKSHMILMCSDLRRSSLRSGLYTPAYGGFFEFDLEKERKISLRTLIDRSAVESFGGGGRVCITARIYPVALVDGRVHMYAFNNGSTTVRVPQLGAWSMMTAQVNVNKG

SEQ ID NO: 174 - protein, 569 aa, Festuca arundinacea Lolium perenne
MAQGWPFFLLVLFSSCVSNHLVNGERVFLFPQSHKVSSIVSKRYRTAYHFQPPKNWINGPMYYNGIYHEFYQYNPNGSLWGNIIWGHSVSTDLINWIPVEPAIERDIPSDINGCWTGSATIISGDQPIIIYTGADKENRQLQNIVLPKNKSDPYLREWTKAGNNPVIQPVGPGLNASQFRDPTTGWIGPDGLWRIAVGAELNGYGAALLYKSQDFLNWTRVDHPLYSSNASSMWECPDFFAVLPGNSGGLDLSAEIPNGAKHVLKMSLDSCDKYMIGVYDLKSDTFMPDSVLDDRRLWSRIDHGNFYASKSFFDSKKGRRIIWGWTNETDSSSDDVAKGWAGIHAIPRTIWLDSYGKQLLQWPIEEIESLRRNEISHQGLELKKGDLFEIKGTDTSQADVEVDFELTSIDNADPFDPSWLLDVEKQCREAGASVQGGIGPFGLVVLASDNMEEHTAVHFRVYKSQQSYMILMCSDLRRSSLRSGMYTPAYGGFFEFDLQKERKISLRTLIDRSAVESFGGGGRVCIMARVYPVVLVDDGGAHMYAFNNGSTTVRVPQLRAWSMSRAEHK

SEQ ID NO: 175 - protein, 588 aa, Lolium perenne
MGVRLGRVAWACPAVLVLLLQLAGASHVVYETSLLETEAAAATVPASIFELSTGYHFRPQKNWINDPNAPLYYKGWYHLFFQYNPKGAVWGNIVWAHSVSRDLINWVALETALAPSIDADKYGCWSGSATIMPDGTPVIMYTGVSRPDVNYEVQNVAFPKNSSDPLLREWVKPAHNPVIVPEGGINATQFRDPTTAWYADGHWRILVGALSGASRGVAYVYRSRDFRRWTRVRKPLHSAPTGMWECPDFYPVTVDGKESGVDTSVVSSSRVKHVLKNSLDLRRYDYYTVGTYDRLKERYVPDNPAGDKHHLRYDYGNFYASKTFYDPSKRRRILWGWANESDTAVDDVAKGWAGIQAIPRKVWLDPSGRQLMQWPVEEVEALRGKKPVSLKDRMVKRGEHVEVTGLQTAQADVEVSFEVPSLEGAEALDPALANDAQKLCGVKGADVEGGVGPFGLWVLASSKLEERTAVFFRVFKAAGNVNSTKPLVLMCSDPTKSSLNKNLYHPTFAGFVDIDMAKGKISLRSLIDQSVVESFGAGGRTCILSRVYPSLAIGRNAHLHVFNNGKADIKVSRLTAWEMKKPALMNGA

SEQ ID NO: 176 - protein, 670 aa, Lolium perenne
MPMEARDGVSMPYSYAALPEDAEAAVVGRGRRTGPLFAALLLTLVAALLAVAALAGVRLVGELPAGGVVMPNHPMEVMDVSGSRGPESGVSEKTSGAASESGGMLGADAGSNAFPWSNAMLQWQRTGFHFQPEKNWMNDPNGPVYYKGWYHLFYQYNPEGAIWGNKIAWGHAVSRDMLRWRHLPIAMFPDQWYDINGAWSGSATVLPDGRIVMLYTGSTNASVQVQCLAFPSDPSDPLLTNWTKYEGNPVLYPPPHVGEKDFRDPTTAWYDGSDGMWRIVIGSKDNRRAGMALTYKTKNFHDFELVPGVLHRVPATGMWECIDLYPVGGARGIDMTEAVAAASNSGGGEVLHVMKESSDDDRHDYYALGRYDAATNKWTPLDADADVGIGLRYDWGKFYASKTFYDPAKKRRVLWGWVGETDSERADVAKGWASLQSIPRTVVLDTKTGSNLIQWPVVEVETLRTNSTNLGSIIVEHGSVFPLSLHRATQLDIEASFRLDPLDVAAAKEADVGYNCSTSGGAAGRGALGPFGLLVLADARRHGGDTEQTAVYFYVARGLDGNLRTHFCHDESRSSRANDIVKRVVGNIVPVLDGEALSVRVLVDHSIVESFAQGGRSVVTSRVYPTEAIYANAGVYLFNNATGARVTATSLVVHEMDPSYNQNQAEMASL

SEQ ID NO: 177 - protein, 514 aa, Lolium perenne
MHADPNGPVYYRGWYHLFYQYNPEGAVWGNIAWGHAVSRDLVHWRHLPLAMVPDQWYDINGVWTGSATVFPDGTLNMLYTGSTNASVQAQCLAVPEDPNDSLLRNWTKHEANPVLLPPPGIGDKDFRDPTTAWFDESDQTWRTVIGSKDNNGHAGIAMVYKTKDFLNYELIPGYLHRVDGTGMWECIDFYPVGGKNGSEELYVIKESSDDDRHDWYTLGKYDAAANTFTAADPENDLGIGLRYDWGKFYASKTFYDPAKKRRVLWGWIGETDSERADVAKGWASLMSIPRTVELDEKTWTNLIQWPVEEIETLRIKSTDLGGITIDHGSVYPLPLHRATQLDIEASFRLDAATVAALNEADVGYNCSTSGGSTHRGALGPFGILVLADGKAEQTAVYFYVSKGLDGALETHFCHDESRSTLAKDVVKRVVGYTVPVLDGEAFSVRVLVDHSIVESFAMGGRSTATSRVYPTESIYGAAGAYLFNNATGGSVTVEKLVVHEMDSSYNQIFMADDL

SEQ ID NO: 178 - protein, 557 aa, Lolium perenne
MGSVPEESVVSVAAAETVFRSKLPDIEINNEQTLQSYCFEKMAEVASRPCIIDGQTGASYTYTEVDSLTRRAAAGLRRMGVGKGDVVMNLLRNCPEFAFSFLGAARLGAATTTANPFYTPHEIHRQAEAAGAKLIVTEACAVEKVLEFAAGRGLPVVTVDGRRDGCVDFAELIAGEELPEADEAGILPDDVVALPYSSGTTGLPKGVMLTHRSLVTSVAQLVDGSNPNVCFNKDDALLCLLPLFHIYSLHTVLLAGLRVGAAIVIMRKFDVGALVDLVRAHRITIAPFVPPIVVEIAKSDRVGADDLASIRMVLSGAAPMGKDLQDAFMAKIPNAVLGQGYGMTEAGPVLAMCLAFAKEPFKVKSGSCGTVVRNAELKVVDPDTGASLGRNQPGEICVRGKQIMIGYLNDPESTKNTIDKDGWLHTGDIGLVDDDDEIFIVDRLKEIIKYKGFQVAPAELEALLLTNPEVKDAAVVGVKDDLCGEVPVAFIKRIEGSEITENEIKQFVSKEVVFYKRINKVYFTDSIPKNPSGKILRKDLRARLAAGIPTEVAAPRS

SEQ ID NO: 179 - protein, 501 aa, Lolium perenne
MEVLLLEKALLGLFAAAVLAIAVAKLAGKRFRLPPGPSGAPIVGNWLQVGDDLNHRNLMGIAKRFGEVFLLRMGIRNLVVVSSPELAKEVLHTQGVEFGSRTRNVVFDIFTGNGQDMVFTVYGDHWRKMRRIMTVPFFTNKVVAQNRVGWEEEARLVVEDVKADPASATAGTVIRRRLQLMMYNDMFRIMFDRRFESVDDPLFNKLKAMNAERSILSQSFDYNYGDFIPILRPFLRKYLNRCTNLKTKRMKLFEDHFVADRKKALEQNGEIRCAMDHILEAERKGEINHDNVLYIVENINVAAIETTLWSIEWGIAELVNHPDVQSKLRDEMTAVLGADVAVTEPDLERLPYLQSVVKETLRLRMAIPLLVPHMNLSDAKLAGYDIPAESKILVNAWFLANDPKRWVRADEFRPERFLEEEKAVEAHGNDFRFVPFGVGRRSCPGIVLALPIIGITLGRLVQNFQLLPPPGQDKIDTTEKPGQFSNQILKHATVVCKPLEA

SEQ ID NO: 180 - protein, 361 aa, Lolium perenne
MGSVDASEKTITGWAARDATGHLSPYTYNLRRTGAEDVVLKVLYCGICHTDLHQTKNHLGASKYPMVPGHEVVGEVVEVGPEVSKYSVGDVVGVGVIVGCCRDCRPCKANVEQYCNKKIWSYNDVYTDGKPTQGGFASSMVVDQKFVVKIPAGLAPEQAAPLLCAGVTVYSPLKHFGLMTPGLRGGILGLGGVGHMGVKVAKSMGHHVTVISSSDKKRAEAMDDLGADAYLVSSDEAQMAAAMDSLDYIIDTVPVKHPLEPYLALLKMDGKLVLMGVIGEPLSFVSPMVMLGRKTITGSFIGSIEETEEVLRFCVDKGLTSQIEVVKMDYLNQALERLERNDVRYRFVVDVAGSNIDDTAA

SEQ ID NO: 181 - protein, 363 aa, Lolium perenne
MTVVEVLAAGDAAAAAVARPAGNGQTVCVTGAAGYIASWLVKLLLEKGYTVKGTVRNPDDPKNAHLRALDGAADRLVLCKADLLDYDAIRRAIDGCHGVFHTASPVTDDPEQMVEPAVRGTQYVIDAAAEAGTVRRMVLTSSIGAVTMDPNRGPDVVVDESCWSDLDFCKKTRNWYCYGKAVAEQAASELARQRGVDLVVVNPVLVIGPLLQPTVNASIGHILKYLDGSASKFANAVQAYVDVRDVADAHLRVFECAAASGRHLCAERVLHREDVVRILAKLFPEYPVPTRCSDEANPRKQPYKMSNQKLQDLGLEFRPVSQSLYETVKSLQEKGHLPVLSEQAEADKETLAAELQAGVTIRA

SEQ ID NO: 182 - protein, 360 aa, Festuca arundinacea
MGSTAADMAASADEEACMFALQLASSSILPMTLKNAIELGLLEILVAAGGKSLTPTEVAAKLPSAANPEAPDMVDRMLRLLASYNVVTCLVEEGKDGRLSRSYGAAPVCKFLTPNEDGVSMAALALMNQDKVLMESWYYLKDAVLDGGIPFNKAYGMSAFEYHGTDPRFNRVFNEGMKNHSIIITKKLLELYHGFQGLGTLVDVGGGVGATVAAIAAHYPAIKGVNFDLPHVISEAPQFPGVTHVGGDMFKEVPSGDAILMKWILHDWSDQHCATLLKNCYDALPAHGKVVLVECILPVNPEAKPSSQGVFHVDMIMLAHNPGGRERYEREFEALARGAGFTGVKSTYIYANAWAIEFTK

SEQ ID NO: 183 - protein, 543 aa, Lolium perenne
MVGFAKIAMEWIQDPLSWLFIASVVFVVLQRRRRGNVAPFPPGPKPLPIVGNMSMMDQLTHRGLAALAKEYGGLLHIRLGKLHTFAVSTPEYAREVLQVQDGAFSNRPATIAIAYLTYDRADMAFAHYGPFWRQMRKLCVMKLFSRRRPETWLAVRDESAALVRAVARRTGESVDLGELIFKLTKNVIFRAAFGAGAVAADAEEGDGAGKQDEFIAILQEFSKLFGAFNIGDFIPWLSWADPQGINVRLRAARNALDEFIDKIIDEHMERGKNPDDADADMVDDMLAFLPEAKPKKGAAGDGVDDLQNTLRLTRDNIKAIIMDVMFGGTETVASAIEWAMAEMMHSPDDLRRLQQELVDVVGLDRNVDESDLDKLPFLKCVIKETLRLHPPIPLLLHETAEDCVVGGYSVPRGSRVMINVYAIGRDRRAWKDADVFRPSRFVQGEGEAAGLDFKGGCFEFLPFGSGRRSCPGMALGLYALELAVAQLAHGFSWELPDGMKPSELDMSDVFGLTAPRATRLFAVPTPRLACTQLLGADDAGRQA

SEQ ID NO: 184 - protein, 713 aa, Festuca arundinacea
MECENGHVAANGDGLCVAQPARADPLNWGKAAEELSGSHLDAVKRMVEEYRRPVVTMEGASLTIAMVAAVAAGADTRVELDESARGRVKESSDWVMNSMANGTDSYGVTTGFGATSHRRTKEGGALQRELIRFLNAGAFGTGSDGHVLPAATTRAAMLVRVNTLLQGYSGIRFEILETIATLLNANVTPCLPLRGTITASGDLVPLSYIAGLVTGRPNSVATAPDGSKVNAAEAFKIAGIQHGFFELQPKEGLAMVNGTAVGSGLASIVLFEANILGILAEVLSAVFCEVMNGKPEYTDHLTHKLKHHPGQIEAAAIMEHILEGSSYMMLAKKLGELDPLMKPKQDRYALRTSPQWLGPQIEVIRAATKSIEREINSVNDNPLIDVSRGKAIHGGNFQGTPIGVSMDNTRLAIAAIGKLMFAQFSELVNDFYNNGLPSNLSGGRNPSLDYGFKGAEIAMASYCSELQFLGNPVTNHVQSAEQHNQDVNSLGLISSRKTAEAIDILKLMSSTFMVALCQAIDLRHIEENVKNAVKNCVKTVARKTLSTNDSGHLHNARFCEKDLLLTIDREAVFAYADDPCSANYPLMQKMRAVLVEHALANGEAEQDVQTSVFAKLATFEQELRAVLPKEVESARCSVENGTAAQQNRISECRSYPLYRFVRKELGTEYLTGEKTRSPGEEVDKVFVAMNQGKHIDALLECLKEWNGEPLPIC

SEQ ID NO: 185 - protein, 324 aa, Lolium perenne
MAPATPKDSSALPGLLLLFAAATSVAVANAQLSENYYGSSCPTALLTIRTVVTTAVLLDHRMGASLLRLHFHDCFVQGCDASVLLDDTAGFTGEKGAGPNAGSLRGLEVIDKIKMLLEFMCPRTVSCADILAVAARDSVVRLGGPSWAVQLGRRDATTASASLASSDLPGPNSNLNDLLTAFSKKGLSTTDMVALSGAHTIGRAQCQNYRNRIYTDTDIDGAFAASLRGGCPQAGGDGNLAPLDASSPNTFDNGYFSGLLSRQGLLHSDQALYDGGSTDDLVRTYASNNDQFGSDFAAAMVKLSNIGLLTGSSGEIRVNCRAVN

SEQ ID NO: 186 - protein, 398 aa, Lolium perenne
MAATMTVEEVRKAQRAEGPATVLAIGTATPANCVYQADYPDYYFKITKSDHLADLKEKFKRMCDKSQIRKRYMHLTEEILEENPNMCAYMAPSLDARQDIVVVEVPKLGKAAAQKAIKEWGQPRSKITHLVFCTTSGVDMPGADYQLTKMLGLRPSVKRLMMYQQGCFAGGTVLRLAKDLAENNRGARVLVVCSEITAVTFRGPHESHLDSLVGQALFGDGAAAVIIGADPDVSVERPLFQLVSASQTILPDSEGAIDGHLREVGLTFHLLKDVPGLISKNIERALEEAFKPLGIDDWNSVFWVAHPGGPAILDMVEAKVNLNKERMRATRHVLSEYGNMSSACVLFIMDEMRKRSAEDGHTTTGEGMDWGVLFGFGPGLTVETVVLHSMPIAADATA

SEQ ID NO: 187 - protein, 370 aa, Festuca arundinacea
MKQEVKSEMNGETMSGNKGPVVVTGASGFVGSWLVMKLLQAGYTVRATVRDPGNVEKTKPLLELPGAKERLSIWRADLSEEGSFDEAIAGCTGVFHVATPMDFESKDPENEVIKPTVEGMLSIMRACKEAGTVKRVVFTSSAGTVNIEERPRPAYDQDNWSDIDFCRRVKMTGQMYFVSKSLAEKAAMDYAKENGVDFISIIPTLVVGPFLSAGMPPSLVTALALITGNEAHYSILKQVQLVHLDDLCDSMTYLFEHPDANGRYICSSHDTTIHGIARMLKERFPEYDIPQKFPGVDDDLQPIHFFFKKLLDHGFRFRYTAEDMFDAAVWTCREKGLIPLGAEGAGGPASAAGKLGAVLVGEGQAIGAET

SEQ ID NO: 188 - protein, 329 aa, Lolium perenne
MATEAKGETVLVTGASGFIGSWLVRLLLARGYSVHAAVLNPDDKAETDHLLALAAAAGDEGRIRFFRCDLLDGAAMLAAVRGCSGVFHLASPCTVDLVLDPQKELVVPAVEGTLNVLRAAKEAGGVRRVVVTSSVSALVPCPGWPAGEVLDERCWTDIDYCDKNGVWYPASKALAEKAAWKFAEENGLDVVTVNPGTVLGEMIPPRLNASMAMFLRLLEGCKEEYADFFIGPVHVEDVALAHILLYENPSASGRHLCVEPICHWSVFAAKVAELYPDYKVPKFPEDTQPGLVRAEAVPKKLMALGLQFTPLEKIIRDAVESLKSRGCIA

SEQ ID NO: 189 - protein, 330 aa, Lolium perenne
MVSSTKGKVCVTGASGFVASWLIKKLLESGYHVIGTVRDPGNRRKVGHLWKLPGANERLQLVRADLLEEGSFDDAVRACEGVFHIASPVLGKSDSNCKEATLGPAINGTLNVLRSCKKSPFLKRVVLTSSSSAVRIRDETQQPELLWDETTWSSVPLCEKLQLWYALAKVFAEKAALDFAKENNIDLVTVLPSFVIGPSLSHELCTTASDILGLLQGDTDRFTLYGRMGYVHIDDVARSHILVYETPEATGRYLCSSVVLDNNELVGLLAKQFPVFPIPRRLKNPYGKQAYQLDTSKLQGLGLKFKGVQEMFNDCVESLKDQGHLLECPL

SEQ ID NO: 190 - protein, 326 aa, Lolium perenne
MAPATPKDSSSSALPGLLLLLAAATSVAVANAQLSENYYGSSCPTALLTIRTVVTTAVLLDHRMGASLLRLHFHDCFVQGCDASVLLDDTAGFTGEKGAGPNAGSLRGLEVIDKIKMLLEFMCPRTVSCADILAVAARDSVVRLGGPSWAVQLGRRDATTASASLASSDLPGPNSNLNDLLTAFSKKGLSTTDMVALSGAHTIGRAQCQNYRNRIYTDTDIDGAFAASLRGGCPQAGGDGNLAPLDASSPNTFDNGYFSGLLSRQGLLHSDQALYDGGSTDDLVRTYASNNDQFGSDFAAAMVKLSNIGLLTGSSGEIRVNCRAVN

SEQ ID NO: 191 - DNA, 26 bp, Artificial Sequence
  Made in the lab
catatggataagctcaatggttctgc

SEQ ID NO: 192 - DNA, 21 bp, Artificial Sequence
  Made in the lab
cggtagagatccagtctagag

SEQ ID NO: 193 - DNA, 28 bp, Artificial Sequence
  Made in the lab
tacatatgctgcacgagaagttctacag

SEQ ID NO: 194 - DNA, 21 bp, Artificial Sequence
  Made in the lab
ccacggctaactaatggttca

SEQ ID NO: 195 - DNA, 29 bp, Artificial Sequence
  Made in the lab
tacatatgaaaggttctgggctgtccgtc

SEQ ID NO: 196 - DNA, 22 bp, Artificial Sequence
  Made in the lab
ctagttcaccttggagcagttg

SEQ ID NO: 197 - DNA, 18 bp, Artificial Sequence
  Made in the lab
gcagacggcggtctactt

SEQ ID NO: 198 - DNA, 23 bp, Artificial Sequence
  Made in the lab
aaatgcaagtgacccaacgttac

SEQ ID NO: 199 - DNA, 20 bp, Artificial Sequence
  Made in the lab
tcatgacgattccaagaacg

SEQ ID NO: 200 - DNA, 19 bp, Artificial Sequence
  Made in the lab
gttgaccgtgactcgtcgt

SEQ ID NO: 201 - DNA, 27 bp, Artificial Sequence
  Made in the lab
actgaattctcggtcccagcctccatt

SEQ ID NO: 202 - DNA, 29 bp, Artificial Sequence
  Made in the lab
gtagcggccgcgcgaaaactcgtcggaga

SEQ ID NO: 203 - DNA, 27 bp, Artificial Sequence
  Made in the lab
gctgaattcctccgatggctctctgac

SEQ ID NO: 204 - DNA, 28 bp, Artificial Sequence
  Made in the lab
atgcggccgcaagtccaatcggccacac

SEQ ID NO: 205 - DNA, 25 bp, Artificial Sequence
  Made in the lab
tatgaattcggcgccgacgccggca

SEQ ID NO: 206 - DNA, 27 bp, Artificial Sequence
  Made in the lab
atgcggccgcgcaacatgctagcacaa

SEQ ID NO: 207 - DNA, 19 bp, Artificial Sequence
  Made in the lab
aaacagaagtagcggcggc

SEQ ID NO: 208 - DNA, 18 bp, Artificial Sequence
  Made in the lab
ggtcgtagaaggacttgg

SEQ ID NO: 209 - DNA, 18 bp, Artificial Sequence
  Made in the lab
cgccttcatcttcaagac

SEQ ID NO: 210 - DNA, 17 bp, Artificial Sequence
  Made in the lab
agccctggcgtaaatgg

SEQ ID NO: 211 - DNA, 20 bp, Artificial Sequence
  Made in the lab
gacgcaaggagagatccaga

SEQ ID NO: 212 - DNA, 20 bp, Artificial Sequence
  Made in the lab
agacgaggtgggtgatcttg

SEQ ID NO: 213 - DNA, 20 bp, Artificial Sequence
  Made in the lab
tccatcctcttcacccactc

SEQ ID NO: 214 - DNA, 20 bp, Artificial Sequence
  Made in the lab
ggcagcggtttctttattca

SEQ ID NO: 215 - DNA, 20 bp, Artificial Sequence
  Made in the lab
ggccatgtttcttcgcttac

SEQ ID NO: 216 - DNA, 20 bp, Artificial Sequence
  Made in the lab
ctacgacggaagggtgacat

SEQ ID NO: 217 - DNA, 20 bp, Artificial Sequence
  Made in the lab
gtggacatggaccagaaggt

SEQ ID NO: 218 - DNA, 20 bp, Artificial Sequence
  Made in the lab
cggtacatctcggtgaaggt

SEQ ID NO: 219 - DNA, 20 bp, Artificial Sequence
  Made in the Lab
ccactatccttcgcaagacc

SEQ ID NO: 220 - DNA, 20 bp, Artificial Sequence
  Made in the Lab
tgcgatcataggcgtctcgc

SEQ ID NO: 221 - DNA, 20 bp, Artificial Sequence
  Made in the Lab
gaattcggtaccccatcaac

SEQ ID NO: 222 - DNA, 20 bp, Artificial Sequence
  Made in the Lab
ggcaaaggtgtggagcttac

1. An isolated polynucleotide comprising a sequence selected from the group consisting of:
(a) SEQ ID NO: 1-62 and 125-162;
(b) complements of SEQ ID NO: 1-62 and 125-162;
(c) reverse complements of SEQ ID NO: 1-62 and 125-162; and
(d) reverse sequences of SEQ ID NO: 1-62 and 125-162;

2. An isolated polynucleotide comprising a sequence selected from the group consisting of:
(a) sequences having at least 75% identity to a sequence of SEQ ID NO: 1-62 and 125-162;
(b) sequences having at least 90% identity to a sequence of SEQ ID NO: 1-62 and 125-162; and
(c) sequences having at least 95% identity to a sequence of SEQ ID NO: 1-62 and 125-162,
wherein the polynucleotide encodes a polypeptide having substantially the same functional properties as a polypeptide encoded by SEQ ID NO: 1-62 and 125-162.

3. An isolated oligonucleotide probe or primer comprising at least 10 contiguous residues complementary to 10 contiguous residues of a nucleotide sequence recited in claim 1.

4. A kit comprising a plurality of oligonucleotide probes or primers of claim 3.

5. A genetic construct comprising an isolated polynucleotide of any one of claims 1 and 2.

6. A transgenic cell comprising a construct according to claim 5.

7. A genetic construct comprising, in the 5′-3′ direction:
(a) a gene promoter sequence;
(b) a polynucleotide sequence comprising at least one of the following: (1) a polynucleotide coding for at least a functional portion of a polypeptide encoded by a polynucleotide of any one of claims 1 and 2; and (2) a polynucleotide comprising a non-coding region of a polynucleotide of any one of claims 1 and 2; and
(c) a gene termination sequence.

8. The genetic construct of claim 7, wherein the polynucleotide is in a sense orientation.

9. The genetic construct of claim 7, wherein the polynucleotide is in an anti-sense orientation.

10. A transgenic plant cell comprising a construct of claim 7.

11. A plant comprising a transgenic plant cell according to claim 10, or fruit or seeds or progeny thereof.

12. A method for modulating one or more of the lignin composition, fructan composition and tannin composition of a plant, comprising stably incorporating into the genome of the plant at least one polynucleotide of any one of claims 1 and 2.

13. The method of claim 12, wherein the plant is selected from the group consisting of grasses.

14. The method of claim 13, wherein the plant is selected from the group consisting of: Lolium perenne and Festuca arundinacea.

15. The method of claim 12, comprising stably incorporating into the genome of the plant a construct of claim 7.

16. A method for producing a plant having one or more of altered lignin composition, altered fructan composition and altered tannin composition, comprising:
(a) transforming a plant cell with a construct of claim 7 to provide a transgenic cell; and
(b) cultivating the transgenic cell under conditions conducive to regeneration and mature plant growth.

17. A method for modifying the activity of a polypeptide involved in a lignin, fructan or tannin biosynthetic pathway in a plant, comprising stably incorporating into the genome of the plant a construct of claim 7.

18. An isolated polypeptide comprising an amino acid sequence selected from the group consisting of: SEQ ID NO: 63-124 and 163-190.

19. An isolated polypeptide comprising an amino acid sequence selected from the group consisting of:
(a) sequences having at least 75% identity to a sequence of SEQ ID NO: 63-124 and 163-190;
(b) sequences having at least 90% identity to a sequence of SEQ ID NO: 63-124 and 163-190; and
(c) sequences having at least 95% identity to a sequence of SEQ ID NO: 63-124 and 163-190
wherein the polypeptide has substantially the same functional properties as a polypeptide of SEQ ID NO: 63-124 and 163-190.

20. An isolated polynucleotide that encodes a polypeptide of claim 18.

21. An isolated polypeptide encoded by a polynucleotide of any one of claims 1 and 2.
